United States Patent Application Publication US 2026/0240980 A1 - sequence listing, part 6

SEQ ID NO: 32359 - RNA, 1701 nt, synthetic construct
  misc_feature 1..1701: note = hemagglutinin__InfluenzaA__ABU92708
  source 1..1701: mol_type = other RNA
atgaagactatcattgctttgagctacattctatgtctggttttcgctcaaaaacttcccggaaatgacaacagcacggcaacgctgtgccttgggcaccatgcagtaccaaacggaacgatagtgaaaacaatcacgaatgaccaaattgaagttactaatgctactgagctggttcagatttcctcaacaggtgaaatatgcgacagtccccatcagatccttgatggagaaaactgcacactaatagatgctctattgggagaccctcagtgtgatggcttccaaaataagaaatgggacctttttgtcgaacgcagcaaagcctacagcaactgttacccttatgatgtgccggattatgcctcccttaggtcactagttgcctcatccggcacactggagtttaacaatgaaagcttcgattggactggagtcactcagaatggaacaagctctgcttgcaaaaggagatctgataaaagtttctttagtagattgaattggttgacccacttaaaatacaaatacccagcattgaacgtaactatgccaaacaatgaaaaatttgacaaattgtacatttggggggttcaccacccgggtacggacagtgaccaaatcagcctatatgctcaagcatcaggaagaatcacagtctctaccaaaagaagccaacaaactgtaatcccgaatatcggatctagacccagggtaagggatgtctccagccgaataagcatctattggacaatagtaaaaccgggagacatacttttgattaacagcacagggaatctaattgctcctcggggttacttcaaaatacgaagtgggaaaagctcaataatgagatcagatgcacccattggcaaatgcaattctgaatgcatcactccaaatggaagcattcccaatgacaaaccatttcaaaatgtaaacaggatcacatatggggcctgtcccagatatgttaagcaaaacactctgaaattggcaacagggatgcgaaatgtaccagagaaacaaactagaggcatatttggcgcaatcgcgggtttcatagaaaatggttgggagggaatggtggacggttggtacggtttcaggcatcaaaattctgagggcacaggacaagcagcagatctcaaaagcactcaagcagcaatcaaccaaatcaatgggaaactgaataggttaatcgggaaaacaaacgagaaattccatcagattgaaaaagaattctcggaagtagaaggaagaattcaggacctcgagaaatatgttgaggacactaaaatagatctctggtcatacaacgcggagcttcttgttgccctggagaaccaacatacaattgatctaactgactcagaaatgaacaaactgtttgaaagaacaaagaagcaactgagggaaaatgctgaggatatgggcaatggttgtttcaaaatataccacaaatgtgacaatgcctgcatagggtcaatcagaaatggaacttatgaccatgatgtgtacagagatgaagcattaaacaaccggttccagatcaaaggtgttgagctgaagtcaggatacaaagattggatcctatggatttcctttgccatatcatgttttttgctttgtgttgctttgttggggttcatcatgtgggcctgccaaaaaggcaacattaggtgcaacatttgcatttga

SEQ ID NO: 32360 - RNA, 1701 nt, synthetic construct
  misc_feature 1..1701: note = hemagglutinin__InfluenzaA__ABU92709
  source 1..1701: mol_type = other RNA
atgaagactatcattgctttaagctacattctatgtctggttttcgctcaaaagcttcccggaaatgacaacagcacggcaacgctgtgccttgggcaccatgcagtaccaaacggaacgatagtgaaaacaatcacgaatgaccaaattgaagttactaatgctactgagctggttcagagttcctcaacaggtggaatatgcgacagtcctcatcagatccttgatggagaaaactgcacactaatagatgctctattgggagaccctcagtgtgatggcttccaaaataagaaatgggacctttttgttgaacgcagcaaagcctacagcaactgttacccttatgatgtgccggattatgcctcccttaggtcactagttgcctcatccggcacactggagtttaacaatgaaagcttcaattgggctggagtcactcagaatggaacaagctctgcttgcaaaaggagatctaataaaagtttctttagtagattgaattggttgacccacttaaaatacaaatacccagcattgaacgtgactatgccaaacaatgaaaaatttgacaaattgtacatttggggggttcaccacccgggtacggacagtgaccaaatcagcctatatgctcaagcatcaggaagaatcacagtctctaccaaaagaagccaacaaactgtaatcccgaatatcggatctagacccagggtaagggatgtctccagcagaataagcatctattggacaatagtaaaaccgggagacatacttttgattaacagcacagggaatctaattgctcctcggggttacttcaaaatacgaagtgggaaaagctcaataatgagatcagatgcacccattggcaaatgcaattctgaatgcatcactccaaatggaagcattcccaatgacaaaccatttcaaaatgtaaacaggatcacatatggggcctgtcccagatatgttaagcaaaacactctgaaattggcaacagggatgcgaaatgtaccagagaaacaaactagaggcatatttggcgcaatcgcgggtttcatagaaaatggttgggagggaatggtggacggttggtacggtttcaggcatcaaaattctgagggcacaggacaagcagcagatctcaaaagcactcaagcagcaatcaaccaaatcaatgggaaactgaataggttaatcgggaaaacaaacgagaaattccatcagattgaaaaagaattctcagaagtagaagggagaattcaggacctcgagaaatatgttgaggacactaaaatagatctctggtcatacaacgcggagcttcttgttgccctggaaaaccaacatacaattgatctaactgactcagaaatgaacaaactgtttgaaagaacaaagaagcaactgagggaaaatgctgaggatatgggcaatggttgtttcaaaatataccacaaatgtgacaatgcctgcatagagtcaatcagaaatggaacttatgaccatgatgtatacagagatgaagcattaaacaaccggttccagatcaaaggtgttgagctgaagtcaggatacaaagattggatcctatggatttcctttgccatatcatgttttttgctttgtgttgctttgttggggttcatcatgtgggcctgccaaaaaggcaacattaggtgcaacatttgcatttga

SEQ ID NO: 32361 - RNA, 1701 nt, synthetic construct
  misc_feature 1..1701: note = hemagglutinin__InfluenzaA__ABU92710
  source 1..1701: mol_type = other RNA
atgaagactatcattgctttaagctacattttatgtctggttttcgctcaaaaacttcccggaaatgacaacagcacggcaacgctgtgcctggggcaccatgcagtgccaaacggaacgctagtgaaaacaatcacgaatgaccaaattgaagtgactaatgctactgagctggttcagagttcctcaacaggtagaatatgcgacagtcctcaccaaatccttgatggagaaaactgcacactaatagatgctctattgggagaccctcattgtgatggcttccaaaataaggaatgggacctttttgttgaacgcagcaaagcctacagcaactgttacccttatgatgtgccggattatgtctcccttaggtcactagttgcctcatcaggcacgctggagtttaacaatgaaagcttcaactggactggagtcgctcagaatggaacaagctctgcttgcaaaaggagatctgataaaagtttctttagtagattgaattggttgcaccaattaaaatacaaatatccagcactgaacgtgactatgccaaacaatgaaaaatttgacaaattgtacatttggggggttcaccacccgggtacagacagtgaccaaatcagcctatatgctcaagcatcagggagagtcacagtctctaccaaaagaagccaacaaactgtaatcccgaatatcggatctagaccctgggtaaggggtgtctccagcagaataagcatctattggacaatagtaaaaccgggagacatacttttgattaacagcacagggaatctaattgctcctcggggttacttcaaaatacgaagtgggaaaagctcaataatgaggtcagatgcacccattggcaaatgcaattctgaatgcatcactccaaatggaagcattcccaatgacaaaccatttcaaaatgtaaacaggatcacatatgggccctgtcccagatatgttaagcaaaacactctgaaattggcaacagggatgcggaatgtgccagaaaaacaaactagaggcatattcggtgcaatcgcgggcttcatagaaaatggttgggagggaatgatggacggttggtacggtttcaggcatcaaaattctgagggcacagggcaagcagcagatcttaaaagcactcaagcagcaatcaaccaaatcaacgggaaactgaataggttaatcgagaaaacgaacgagaaattccatcaaattgaaaaagaattctcagaagtagaagggagaattcaggacctcgagaaatatgttgaggacactaaaatagatctctggtcgtacaatgcggagcttcttgttgccctggagaaccaacatacaattgatctaactgactcagaaatgaacaaactgtttgaaagaacaaagaagcaactgagggaaaatgctgaggatatgggcaatggttgtttcaaaatataccacaaatgtgacaatgcctgcatagggtcaatcagaaatggaacttatgaccatgatgtatacagagacgaagcattgaacaaccggttccagatcaaaggtgttgagctgaagtcaggatacaaagattggatcctatggatttcctttgccatatcatgttttttgctttgtattgttttgctggggttcatcatgtgggcctgccaaaaaggcaacattaggtgcaacatttgcatttga

SEQ ID NO: 32362 - RNA, 1701 nt, synthetic construct; identical to SEQ ID NO: 32265
  misc_feature 1..1701: note = hemagglutinin__InfluenzaA__ABU92711
  source 1..1701: mol_type = other RNA

SEQ ID NO: 32363 - RNA, 1701 nt, synthetic construct
  misc_feature 1..1701: note = hemagglutinin__InfluenzaA__ABU92712
  source 1..1701: mol_type = other RNA
atgaagactatcattgctttgagctacattctatgtctggttttcgctcaaaaacttcccggaaatgacaacagcacggcaacgctgtgccttgggcaccatgcagtaccaaacggaacgatagtgaaaacaatcacgaatgaccaaattgaagttactaatgctactgagctggttcagatttcctcaacaggtggaatatgcgacagtcctcatcagatccttgatggagaaaactgcacactaatagatgctctattgggagaccctcagtgtgatggcttccaaaataagaaatgggacctttttgttgaacgcagtaaagcctacagcaactgttacccttatgatgtgccggattatgcctcccttaggtcactagttgcctcatccggcacactggagtttaacaatgaaagcttcgattggactggagtcactcagaatggaacaagctctgcttgcaaaaggagatctaataaaagcttctttagtagattgaattggttgacccacttaaaatacaaatacccagcattgaacgtgactatgccaaacaatgaaaaatttgacaaattgtacatttggggggttcaccacccgggtacggacagtgaccaaatcagcctatatgctcaagcatcaggaagaatcacagtctctaccaaaagaagccaacaaactgtaatcccgaatatcggatctagacccagggtaagggatgtctccagccgaataagcatctattggacaatagtaaaaccgggagacatacttttgattaacagcacagggaatctaattgctcctcggggttacttcaaaatacgaagtgggaaaagctcaataatgagatcagatgcacccattggcaaatgcaattctgaatgcatcactccaaatggaagcattcccaatgacaaaccatttcaaaatgtaaacaggatcacatatggggcctgtcccagatatgttaagcaaaacactctgaaattggcaacagggatgcgaaatgtaccagagaaacaaactagaggcatatttggcgcaatcgcgggtttcatagaaaatggttgggagggaatggtggacggttggtacggtttcaggcatcaaaattctgagggcacaggacaagcagcagatctcaaaagcactcaagcagcaatcaaccaaatcaatgggaaactgaataggttaatcgggaaaacaaacgagaaattccatcagattgaaaaagaattctcggaagtagaaggaagaattcaggacctcgagaaatatgttgaggacactaaaatagatctctggtcatacaacgcggagcttcttgttgccctggagaaccaacatacaattgatctaactgactcagaaatgaacaaactgtttgaaagaacaaagaagcaactgagggaaaatgctgaggatatgggcaatggttgtttcaaaatataccacaaatgtgacaatgcctgcatagggtcaatcagaaatggaacttatgaccatgatgtgtacagagatgaagcattaaacaaccggttccagatcaaaggtgttgagctgaagtcaggatacaaagattggatcctatggatttcctttgccatatcatgttttttgctttgtgttgctttgttggggttcatcatgtgggcctgccaaaaaggcaacattaggtgcaacatttgcatttga

SEQ ID NO: 32364 - RNA, 1701 nt, synthetic construct; identical to SEQ ID NO: 32266
  misc_feature 1..1701: note = hemagglutinin__InfluenzaA__ABU92713
  source 1..1701: mol_type = other RNA

SEQ ID NO: 32365 - RNA, 1701 nt, synthetic construct; identical to SEQ ID NO: 32266
  misc_feature 1..1701: note = hemagglutinin__InfluenzaA__ABU92714
  source 1..1701: mol_type = other RNA

SEQ ID NO: 32366 - RNA, 1701 nt, synthetic construct
  misc_feature 1..1701: note = hemagglutinin__InfluenzaA__ABU92715
  source 1..1701: mol_type = other RNA
atgaagactatcattgctttgagctacattctatgtctggttttcgctcaaaaacttcccggaaatgacaacagcacggcaacgctgtgccttgggcaccatgcagtaccaaacggaacgatagtgaaaacaatcacgaatgaccaaattgaagttactaatgctaccgagctggttcagatttcctcaacaggtgaaatatgcgacagtcctcatcagatccttgatggagaaaactgcacactaatagatgctctattgggagaccctcagtgtgatggcttccaaaataagaaatgggacctttttgttgaacgcagcaaagcctacagcaactgttacccttatgatgtgccggattatgcctcccttaggtcactagttgcctcatccggcacactggagtttaacaatgaaagcttcgattggactggagtcactcagaatggaacaagctctgcttgcaaaaggagatctaataaaagtttctttagtagattgaattggttgacccacttgaaatacaaatacccagcattgaacgtgactatgccaaacaatgaaaaatttgaaaaattgtacatttggggggttcaccacccgggtacggacagtgaccaaatcaacctatatgctcaagcatcaggaagaatcacagtctctaccaaaagaagccaacaaactgtaatcccgaatatcggatctagacccagggtaagggatgtctccagccgaataagcatctattggacaatagtaaaaccgggagacatacttttgattaacagcacagggaatctaattgctcctcggggttacttcaaaatacgaagtgggaaaagctcaataatgagatcagatgcacccattggcaaatgcaattctgaatgcatcactccaaatggaagcattcccaatgacaaaccatttcaaaatgtaaacagaatcacatatggggcctgtcccagatatgttaagcaaaacactctgaaattggcaacagggatgcgaaatgtaccagagaaacaaactagaggcatatttggcgcaatcgcgggtttcatagaaaatggttgggagggaatggtggacggttggtacggtttcaggcatcaaaattctgagggcacaggacaagcagcagatctcaaaagcactcaagcagcaatcaaccaaatcaatgggaaactgaataggttaatcgggaaaacaaacgagaaattccatcagattgaaaaagaattctcggaagtagaagggagaattcaggacctcgagaaatatgttgaggacactaaaatagatctctggtcatacaacgcggagcttcttgttgccctggagaaccaacatacaattgatctaactgactcagaaatgaacaaactgtttgaaagaacaaagaagcaactgagggaaaatgctgaggatatgggcaatggttgtttcaaaatataccacaaatgtgacaatgcctgcatagggtcaatcagaaatggaacttatgaccatgatgtgtacagagatgaagcattaaacaaccggttccagatcaaaggtgttgagctgaagtcaggatacaaagattggatcctatggatttcctttgccatatcatgttttttgctttgtgttgctttgttggggttcatcatgtgggcctgccaaaaaggcaacattaggtgcaacatttgcatttga

SEQ ID NO: 32367 - RNA, 1701 nt, synthetic construct; identical to SEQ ID NO: 32266
  misc_feature 1..1701: note = hemagglutinin__InfluenzaA__ABU92716
  source 1..1701: mol_type = other RNA

SEQ ID NO: 32368 - RNA, 1701 nt, synthetic construct
  misc_feature 1..1701: note = hemagglutinin__InfluenzaA__ABU92717
  source 1..1701: mol_type = other RNA
atgaagactatcattgctttgagctacattctatgtctggttttcgctcaaaaacttcccggaaatgacaacagcacggcaacgctgtgccttgggcaccatgcagtaccaaacggaacgatagtgaaaacaatcacgaatgaccaaattgaagttactaatgctactgagctggttcagatttcctcaacaggtgaaatatgcgacagtccccatcagatccttgatggagaaaactgcacactaatagatgctctattgggagaccctcagtgtgatggcttccaaaataagaaatgggacctttttgttgaacgcagcaaagcctacagcaactgttacccttatgatgtgccggattatgcctcccttaggtcactagttgcctcatccggcacactggagtttaacaatgaaagcttcgattggactggagtcactcagaatggaacaagctctgcttgcaaaaggagatctgataaaagtttctttagtagattgaattggttgacccacttaaaatacaaatacccagcattgaacgtaactatgccaaacaatgaaaaatttgacaaattgtacatttggggggttcaccacccgggtacggacagtgaccaaatcagcctatatgctcaagcatcaggaagaatcacagtctctaccaaaagaagccaacaaactgtaatcccgaatatcggatctagacccagagtaagggatgtctccagccgaataagcatctattggacaatagtaaaaccgggagacatacttttgattaacagcacagggaatctaattgctcctcggggttacttcaaaatacgaagtgggaaaagctcaataatgagatcagatgcacccattggcaaatgcaattctgaatgcatcactccaaatggaagcattcccaatgacaaaccatttcaaaatgtaaacaggatcacatatggggcctgtcccagatatgttaagcaaaacactctgaaattggcaacagggatgcgaaatgtaccagagaaacaaactagaggcatatttggcgcaatcgcgggtttcatagaaaatggttgggagggaatggtggacggttggtacggtttcaggcatcaaaattctgagggcacaggacaagcagcagatctcaaaagcactcaagcagcaatcaaccaaatcaatgggaaactgaataggttaatcgggaaaacaaacgagaaattccatcagattgaaaaagaattctcggaagtagaaggaagaattcaggacctcgagaaatatgttgaggacactaaaatagatctctggtcatacaacgcggagcttcttgttgccctggagaaccaacatacaattgatctaactgactcagaaatgaacaaactgtttgaaagaacaaagaagcaactgagggaaaatgctgaggatatgggcaatggttgtttcaaaatataccacaaatgtgacaatgcctgcatagggtcaatcagaaatggaacttatgaccatgatgtgtacagagatgaagcattaaacaaccggttccagatcaaaggtgttgagctgaagtcaggatacaaagattggatcctatggatttcctttgccatatcatgttttttgctttgtgttgctttgttggggttcatcatgtgggcctgccaaaaaggcaacattaggtgcaacatttgcatttga

SEQ ID NO: 32369 - RNA, 1701 nt, synthetic construct
  misc_feature 1..1701: note = hemagglutinin__InfluenzaA__ABU92718
  source 1..1701: mol_type = other RNA
atgaagactatcattgctttgagctacattctatgtctggttttcgctcaaaaacttcccggaaatgacaacagcacggcaacgctgtgccttgggcaccatgcagtaccaaacggaacgatagtgaaaacaatcacgaatgaccaaattgaagttactaatgctactgagctggttcagatttcctcaacaggtggaatatgcgacagtcctcatcagatccttgatggagaaaactgcacactaatagatgctctattgggagaccctcagtgtgatggcttccaaaataagaaatgggacctttttgttgaacgcagcaaagcctacagcaactgttacccttatgatgtgccggattatgcctcccttaggtcactagttgcctcatccggcacactggagtttaacaatgaaagcttcgattggactggagtcactcagaatggaacaagctctgcttgcaaaaggagatctaataaaagtttctttagtagattgaattggttgacccacttaaaatacaaatacccagcattgaacgtgactatgccaaacaatgaaaaatttgacaaattgtacatttggggggttcaccacccgggtacggacagtgaccaaatcagcctatatgctcaagcatcaggaagaatcacagtctctaccaaaagaagccaacaaactgtaatcccgaatatcggatctagacccagggtaagggatgtctccagccgaataagcatctattggacaatagtaaaaccgggagacatacttttgattaacagcacagggaatctaattgctcctcggggctacttcaaaatacgaagtgggaaaagctcaataatgagatcagatgcacccattggcaaatgcaattctgaatgcatcactccaaatggaagcattcccaatgacaaaccatttcaaaatgtaaacaggatcacatatggggcctgtcccagatatgttaagcaaaacactctgaaattggcaacagggatgcgaaatgtaccagagaaacaaactagaggcatatttggcgcaatcgcgggtttcatagaaaatggttgggagggaatggtggacggttggtacggtttcaggcatcaaaattctgagggcacaggacaagcagcagatctcaaaagcactcaagcagcaatcaaccaaatcaatgggaaactgaataggttaatcgggaaaacaaacgagaaattccatcagattgaaaaagaattctcggaagtagaaggaagaattcaggacctcgagaaatatgttgaggacactaaaatagatctctggtcatacaacgcggagcttcttgttgccctggagaaccaacatacaattgatctaactgactcagaaatgaacaaactgtttgaaagaacaaagaagcaactgagggaaaatgctgaggatatgggcaatggttgtttcaaaatataccacaaatgtgacaatgcctgcatagggtcaatcagaaatggaacttatgaccatgatgtgtacagagatgaagcattaaacaaccggttccagatcaaaggtgttgagctgaagtcaggatacaaagattggatcctatggatttcctttgccatatcatgttttttgctttgtgttgctttgttggggttcatcatgtgggcctgccagaaaggcaacattagatgcaacatttgcatttga

SEQ ID NO: 32370 - RNA, 1701 nt, synthetic construct
  misc_feature 1..1701: note = hemagglutinin__InfluenzaA__ABU92719
  source 1..1701: mol_type = other RNA
atgaagactatcattgctttgagctacattctatgtctggttttcgctcaaaaacttcccggaaatgacaacagcacggcaacgctgtgccttgggcaccatgcagtaccaaacggaacgatagtgaaaacaatcacgaatgaccaaattgaagttactaatgctactgagctggttcagatttcctcaacaggtggaatatgcgacagtcctcatcagatccttgatggagaaaactgcacactaatagatgctctattgggagaccctcagtgtgatggcttccaaaataagaaatgggacctttttgttgaacgcagcaaagcctacagcaactgttacccttatgatgtgccggattatgcctcccttaggtcactagttgcctcatccggcacactggagtttaacaatgaaagcttcgattggactggagtcactcagaatggaacaagctctgcttgcaaaaggagatctaataaaagtttctttagtagattgaattggttgacccacttaaaatacaaatacccagcattgaacgtgactatgccaaacaatgaaaaatttgacaaattgtacatttggggggttcaccacccgggtacggacagtgaccaaatcagcctatatgctcaagcatcaggaagaatcacagtctctaccaaaagaagccaacaaactgtaatcccgaatatcggatctagacccagggtaagggatgtctccagccgaataagcatctattggacaatagtaaaaccgggagacatacttttgattaacagcacagggaatctaattgctcctcggggttacttcaaaatacgaagtgggaaaagctcaataatgagatcagatgcacccattggcaaatgcaattctgaatgcatcactccaaatggaagcattcccaatgacaaaccatttcaaaacgtaaacaggatcacatatggggcctgtcccagatatgttaagcaaaacactctgaaattggcaacagggatgcgaaatgtaccagagaaacaaactagaggcatatttggcgcaatcgcgggtttcatagaaaatggttgggagggaatggtggacggttggtacggtttcaggcatcaaaattctgagggcacaggacaagcagcagatctcaaaagcactcaagcagcaatcaaccaaatcaatgggaaactgaataggttaatcgggaaaacaaacgagaaattccatcagattgaaaaagaattctcggaagtagaaggaagaattcaggacctcgagaaatatgttgaggacactaaaatagatctctggtcatacaacgcggagcttcttgttgccctggagaaccaacatacaattgatctaactgactcagaaatgaacaaactgtttgaaagaacaaagaagcaactgagggaaaatgctgaggatatgggcaatggttgtttcaaaatataccacaaatgtgacaatgcctgcatagggtcaatcagaaatggaacttatgaccatgatgtgtacagagatgaagcattaaacaaccggttccagatcaaaggtgttgagctgaagtcaggatacaaagattggatcctatggatttcctttgccatatcatgttttttgctttgtgttgctttgttggggttcatcatgtgggcctgtcagaaaggcaacattaggtgcaacatttgcatttga

SEQ ID NO: 32371 - RNA, 1701 nt, synthetic construct
  misc_feature 1..1701: note = hemagglutinin__InfluenzaA__ABU92720
  source 1..1701: mol_type = other RNA
atgaagactatcattgctttgagctacattctatgtctggttttcgctcaaaaacttcccggaaatgacaacagcacggcaacgctgtgccttgggcaccatgcagtaccaaacggaacgatagtgaaaacaatcacgaatgaccaaattgaagttactaatgctactgagctggttcagatttcctcaacaggtgaaatatgcgacagtccccatcagatccttgatggagaaaactgcacactaatagatgctctattgggagaccctcagtgtgatggcttccaaaataagaaatgggacctttttgttgaacgcagcaaagcctacagcaactgttacccttatgatgtgccggattattcctcccttaggtcactagttgcctcatccggcacactggagtttaacaatgaaagcttcgattggactggagtcactcagaatggaacaagctctgcttgcaaaaggagatctgataaaagtttctttagtagattgaattggttgacccacttaaaatacaaatacccagcattgaacgtaactatgccaaacaatgaaaaatttgacaaattgtacatttggggggttcaccacccgggtacggacagtgaccaaatcagcctatatgctcaagcatcaggaagaatcacagtctctaccaaaagaagccaacaaactgtaatcccgaatatcggatctagacccagggtaagggatgtctccagccgaataagcatctattggacaatagtaaaaccgggagacatacttttgattaacagcacagggaatctaattgctcctcggggttacttcaaaatacgaagtgggaaaagctcaataatgagatcagatgcacccattggcaaatgcaattctgaatgcatcactccaaatggaagcattcccaatgacaaaccatttcaaaatgtaaacaggatcacatatggggcctgtcccagatatgttaagcaaaacactctgaaattggcaacagggatgcgaaatgtaccagagaaacaaactagaggcatatttggcgcaatcgcgggtttcatagaaaatggttgggagggaatggtggacggttggtacggtttcaggcaccaaaattctgagggcacaggacaagcagcagatctcaaaagcactcaagcagcaatcaaccaaatcaatgggaaactgaataggttaatcgggaaaacaaacgagaaattccatcagattgaaaaagaattctcggaagtagaaggaagaattcaggacctcgagaaatatgttgaggacactaaaatagatctctggtcatacaacgcggagcttcttgttgccctggagaaccaacatacaattgatctaactgactcagaaatgaacaaactgtttgaaagaacaaagaagcaactgagggaaaatgctgaggatatgggcaatggttgtttcaaaatataccacaaatgtgacaatgcctgcatagggtcaatcagaaatggaacttatgaccatgatgtgtacagagatgaagcattaaacaaccggttccagatcaaaggtgttgagctgaagtcaggatacaaagattggatcctatggatttcctttgccatatcatgttttttgctttgtgttgctttgttggggttcatcatgtgggcctgccaaaaaggcaacattaggtgcaacatttgcatttga

SEQ ID NO: 32372 - RNA, 1701 nt, synthetic construct
  misc_feature 1..1701: note = hemagglutinin__InfluenzaA__ABU92721
  source 1..1701: mol_type = other RNA
atgaagactatcattgctttgagctacattctatgtctggttttcgctcaaaaacttcccggaaatgacaacagcacggcaacgctgtgccttgggcaccatgcagtaccaaacggaacgatagtgaaaacaatcacgaatgaccaaattgaagttactaatgctactgagctggttcagatttcctcaacaggtgaaatatgcgacagtccccatcagatccttgatggagaaaactgcacactaatagatgctctattgggagaccctcagtgtgatggcttccaaaataagaaatgggacctttttgttgaacgcagcaaagcctacagcaactgttacccttatgatgtgccggattatgcctcccttaggtcactagttgcctcatccggcacactggagtttaacaatgaaagcttcgattggactggagtcactcagaatggaacaagctctgcttgcaaaaggagatctgataaaagtttctttagtagattgaattggttgacccacttaaaatacaaatacccagcattgaacgtaactatgccaaacaatgaaaaatttgacaaattgtacatttggggggttcaccacccaggtacggacagtgaccaaatcagcctatatgctcaagcatcaggaagaatcacagtctctaccaaaagaagccaacaaactgtaaccccgaatatcggatctagacccagggtaagggatgtctccagccgaataagcatctattggacaatagtaaaaccgggagacatacttttgattaacagcacagggaatctaattgctcctcggggttacttcaaaatacgaagtgggaaaagctcaataatgagatcagatgcacccattggcaaatgtaattctgaatgcatcactccaaatggaagcattcccaatgacaaaccatttcaaaatgtaaacaggatcacatatggggcctgtcccagatatgttaagcaaaacactctgaaattggcaacagggatgcgaaatgtaccagagaaacaaactagaggcatatttggcgcaatcgcgggtttcatagaaaatggttgggagggaatggtggacggttggtacggtttcaggcatcaaaattctgagggcacaggacaagcagcagatctcaaaagcactcaagcagcaatcaaccaaatcaatgggaaactgaataggttaatcgggaaaacaaacgagaaattccatcagattgaaaaagaattctcggaagtagaaggaagaattcaggacctcgagaaatatgttgaggacactaaaatagatctctggtcatacaacgcggagcttcttgttgccctggagaaccaacatacaattgatctaactgactcagaaatgaacaaactgtttgaaagaacaaagaagcaactgagggaaaatgctgaggatatgggcaatggttgtttcaaaatataccacaaatgtgacaatgcctgcatagggtcaatcagaaatggaacttatgaccatgatgtgtacagagatgaagcattaaacaaccggttccagatcaaaggtgttgagctgaagtcaggatacaaagattggatcctatggatttcctttgccatatcatgttttttgctttgtgttgctttgttggggttcatcatgtgggcctgccaaaaaggcaacattaggtgcaacatttgcatttga

SEQ ID NO: 32373 - RNA, 1701 nt, synthetic construct
  misc_feature 1..1701: note = hemagglutinin__InfluenzaA__ABU92722
  source 1..1701: mol_type = other RNA
atgaagactatcattgctttgagctacattctatgtctggttttcgctcaaaaacttcccggaaatgacaacagcacggcaacgctgtgccttgggcaccatgcagtaccaaacggaacgatagtgaaaacaatcacgaatgaccaaattgaagttactaatgctactgagctggttcagagttcctcaacaggtggaatatgcgacagtcctcatcagatccttgatggagaaaactgcacactaatagatgctctattgggagaccctcagtgtgatggcttccaaaataagaaatgggacctttttgttgaacgcagcaaagcctacagcaactgttacccttatgatgtgccggattatgcctcccttaggtcactaattgcctcatccggcacactggagtttaacaatgaaagcttcaattggactggagtcactcaaaatggaacaagctctgcttgcaaaagaagatctaatagcagtttctttagtagattgaattggttgacccacttaaaattcaaatacccagcattgaacgtgactatgccaaacaatgaagaatttgacaaattgtacatttggggggttcaccacccgggtacagacaatgaccaaatcagcctatatgctcaagcatcaggaagaatcacagtctctaccaaaagaagccaacaaactgtaatcccgaatatcggatctagacccagggtaagggatatccccagcagaataagcatctattggacaatagtaaaaccgggagacatacttttgattaacagcacagggaatctaattgctcctcggggttacttcaaaatacgaagtgggaaaagctcaataatgagatcagatgcacccattggcaaatgcaattctgaatgcatcactccaaatggaagcattcccaatgacaaaccatttcaaaatgtaaacaggatcacatatggggcctgtcccagatatgttaagcaaaacactctgaaattggcaacagggatgcgaaatgtaccagagaaacaaactagaggcatatttggcgcaatcgcgggtttcatagaaaatggttgggagggaatggtggatggttggtacggtttcaggcatcaaaattctgagggaataggacaagcagcagatctcaaaagcactcaagcagcaatcgaccaaatcaatgggaagctgaataggttgatcgggaaaaccaacgagaaattccatcagattgaaaaagaattctcagaagtagaagggagaattcaggacctcgagaaatatgttgaggacactaaaatagatctctggtcatacaacgcggagcttcttgttgccctggagaaccaacatacaattgatctaactgactcagaaatgaacaaactgtttgaaagaacaaagaagcaactgagggaaaatgctgaggatatgggcaatggttgtttcaaaatataccacaaatgtgacaatgcctgcatagggtcaatcagaaatggaacttatgaccatgatgtatacagagatgaagcattaaacaaccggttccagatcaaaggtgttgagctgaagtcaggatacaaagattggatcctatggatttcctttgccatatcatgttttttgctttgtgttgctttgttggggttcatcatgtgggcctgccaaaaaggcaacattaggtgcaacatttgcatttga

SEQ ID NO: 32374 - RNA, 1701 nt, synthetic construct
  misc_feature 1..1701: note = hemagglutinin__InfluenzaA__ABU92723
  source 1..1701: mol_type = other RNA
atgaagactatcattgctttgagctacattctatgtctggttttcgctcaaaaacttcccggaaatgacaacagcacggcaacgctgtgccttgggcaccatgcagtaccaaacggaacgatagtgaaaacaatcacgaatgaccaaattgaagttactaatgctactgagctggttcagatttcctcaacaggtggaatatgcgacagtcctcatcagatccttgatggagaaaactgcacactaatagatgctctattgggagaccctcagtgtgatggcttccaaaataagaaatgggacctttttgttgaacgcagcaaagcctacagcaactgttacccttatgatgtgccggattatgcctcccttaggtcactagttgcctcatccggcacactggagtttaacaatgaaagcttcgattggactggagtcactcagaatggaacaagctctgcttgcaaaaggagatctaataaaagtttctttagtagattgaattggttgacccacttaaaatacaaatacccagcattgaacgtgactatgccaaacaatgaaaaatttgacaaattgtacatttggggggttcaccacccgggtacggacagtgaccaaatcagcctatatgctcaagcatcaggaagaatcacagtctctaccaaaagaagccaacaaactgtaatcccgaatatcggatctagacccagggtaagggatgtctccagccgaataagcatctattggacaatagtaaaaccgggagacatacttttgattaacagcacagggaatctaattgctcctcggggttacttcaaaatacgaagtgggaaaagctcaataatgagatcagatgcacccattggcaaatgcaattctgaatgcatcactccaaatggaagcattcccaatgacaaaccatttcaaaatgtaaacaggatcacatatggggcctgtcccagatatgttaagcaaaacactctgaaattggcaacagggatgcgaaatgtaccagagaaacaaactagaggcatatttggcgcaatcgcgggtttcatagaaaatggttgggagggaatggtggacggttggtacggtttcaggcatcaaaattctgagggcacaggacaagcagcagatctcaaaagcactcaagcagcaatcaaccaaatcaatgggaaactgaataggttaatcgggaaaacaaacgagaaattccatcagattgaaaaagaattctcggaagtagaaggaagaattcaggacctcgagaaatatgttgaggacactaaaatagatctctggtcatacaacgcggagcttcttgttgccctggagaaccaacatacaattgatctaactgactcagaaatgaacaaactgtttgaaagaacaaagaagcaactgagggaaaatgctgaggatatgggcaatggttgtttcaaaatatatcacaaatgtgacaatgcctgcatagggtcaatcagaaatggaacttatgaccatgatgtgtacagagatgaagcattaaacaaccggttccagatcaaaggtgttgagctgaagtcaggatacaaagactggatcctatggatttcctttgccatatcatgttttttgctttgtgttgctttgttggggttcatcatgtgggcctgtcagaaaggcaacattaggtgcaacatttgcatttga

SEQ ID NO: 32375 - RNA, 1701 nt, synthetic construct; identical to SEQ ID NO: 32360
  misc_feature 1..1701: note = hemagglutinin__InfluenzaA__ABU92724
  source 1..1701: mol_type = other RNA

SEQ ID NO: 32376 - RNA, 1701 nt, synthetic construct
  misc_feature 1..1701: note = hemagglutinin__InfluenzaA__ABU92725
  source 1..1701: mol_type = other RNA
atgaagactatcattgctttgagctacattctatgtctggttttcgctcaaaaacttcccggaaatgacaacagcacggcaacgctgtgccttgggcaccatgcagtaccaaacggaacgatagtgaaaacaatcacgaatgaccaaattgaagttactaatgctactgagctggttcagagttcctcaacaggtggaatatgcgacagtcctcatcagatccttgatggagaaaactgcacactaatagatgctctattgggagaccctcagtgtgatggcttccaaaataagaaatgggacctttttgttgaacgcagcaaagcctacagcaactgttacccttatgatgtgccggattatgcctcccttaggtcactagttgcctcatccggcacactggagtttaacaatgaaagcttcaattggactggagtcactcagaatggaacaagctctgcttgcaaaaggagatctaataaaagtttctttagtagattgaattggttgacccacttaaaatacaaatacccagcattgaacgtgactatgccaaacaatgaaaaatttgacaaattgtacatttggggggttcaccacccgggtacggacagtgaccaaattaacctatatgctcaagcatcaggaagaatcacagtttctaccaaaagaagccaacaaactgtaatcccgaatatcggatctagacccagggtaagggatgtccccagcagaataagcatctattggacaatagtaaaaccgggagacttacttttgattaacagcacagggaatctaattgctcctcggggttacttcaaaatacgaagtgggaaaagctcaataatgagatcagatgcacccattggcaaatgcaattctgaatgcatcaccccaaatggaagcattcccaatgacaagccatttcaaaatgtaaacaggatcacatatggggcttgtcccagatatgttaagcaaaacaccctgaaattggcaacagggatgcgaaatgtaccagagaaacaaactagaggcatatttggcgcaatcgcgggtttcatagaaaatggttgggagggaatggtggacggttggtacggtttcaggcatcaaaattctgagggcacaggacaagcagcagatctcaaaagcactcaagcagcaatcaaccaaatcaatgggaaactgaataggttaatcgggaaaacaaacgaaaaattccatcagattgaaaaagaattctcagaagtagaagggagaattcaggacctcgagaaatatgttgaggacactaaaatagatctctggtcatacaacgcggagcttcttgttgccctggagaaccaacatacaattgatctaactgactcagaaatgaacaaactgtttgaaagaacaaagaagcaactgagggaaaatgctgaggatatgggcaatggttgtttcaaaatataccacaaatgtgacaatgcctgcatagggtcaatcagaaatggaacttatgaccatgatgtatacagagatgaagcattaaacaaccggttccagatcaaaggtgttgagctgaagtcaggatacaaagattggatcctatggatttcctttgccatatcatgttttttgctttgtgttgctttgttggggttcatcatgtgggcctgccaaaaaggcaacattaggtgcaacatttgcatttga

SEQ ID NO: 32377 - RNA, 1701 nt, synthetic construct; identical to SEQ ID NO: 32360
  misc_feature 1..1701: note = hemagglutinin__InfluenzaA__ABU92726
  source 1..1701: mol_type = other RNA

SEQ ID NO: 32378 - RNA, 1701 nt, synthetic construct
  misc_feature 1..1701: note = hemagglutinin__InfluenzaA__ABU92727
  source 1..1701: mol_type = other RNA
atgaagactatcattgctttgagctacattctatgtctggttttcgctcaaaaacttcccggaaatgacaacagcacggcaacgctgtgccttgggcaccatgcagtaccaaacggaacgatagtgaaaacaatcacaaatgaccaaattgaagttactaatgctactgagctggttcagagttcctcaacaggtggaatatgcgacagtcctcatcagatccttgatggagaaaactgcacactaatagatgctctattgggagaccctcagtgtgatggcttccaaaataagaaatgggacctttttgttgaacgcagcaaagcctacagcaactgttacccttatgatgtgccggattatgcctcccttaggtcactaattgcctcatccggcacactggagtttaacaatgaaagcttcaattggactggagtcactcaaaatggaacaagctctgcttgcaaaaggagatctaatagcagtttctttagtagattgaattggttgacccacttaaaattcaaatacccagcattgaacgtgactatgccaaacaatgaagactttgacaaattgtacatttggggggttcaccacccgggtacagacaatgaccaaatcagcctatatgctcaagcatcaggaagaatcacagtctctaccaaaagaagccaacaaactgtaatcccgaatatcggatctagacccagggtaagggatatccccagcagaataagcatctattggacaatagtaaaaccgggagacatacttttgattaacagcacagggaatctaattgctcctcggggttacttcaaaatacgaagtgggaaaagctcaataatgagatcagatgcacccattggcaaatgcaattctgaatgcatcactccaaatggaagcattcccaatgacaaaccatttcaaaatgtaaacaggatcacatatggggcctgtcccagatatgttaagcaaaacactctgaaattggcaacagggatgcgaaatgtaccagagaaacaaactagaggcatatttggcgcaatcgcgggtttcatagaaaatggttgggagggaatggtggatggttggtacggtttcaggcatcaaaattctgagggaataggacaagcagcagatctcaaaagcactcaagcagcaatcgaccaaatcaatgggaagctgaataggttgatcgggaaaaccaacgagaaattccatcagattgaaaaagaattctcagaagtagaagggagaattcaggacctcgagaaatatgttgaggacactaaaatagatctctggtcatacaacgcggagcttcttgttgccctggagaaccaacatacaattgatctaactgactcagaaatgaacaaactgtttgaaagaacaaagaagcaactgagggaaaatgctgaggatatgggcaatggttgtttcaaaatataccacaaatgtgacaatgcctgcatagggtcaatcagaaatggaacttatgaccatgatgtatacagagatgaagcattaaacaaccggttccagatcaaaggtgttgagctgaagtcaggatacaaggattggatcctatggatttcctttgccatatcatgttttttgctttgtgttgctttgttggggttcatcatgtgggcctgccaaaaaggcaacattaggtgcaacatttgcatttga

SEQ ID NO: 32379 - RNA, 1701 nt, synthetic construct
  misc_feature 1..1701: note = hemagglutinin__InfluenzaA__ABU92728
  source 1..1701: mol_type = other RNA
atgaagactatcattgctttgagctacattctatgtcaggttttcgctcaaaaacttcccggaaatgacaacagcacggcaacgctgtgccttgggcaccatgcagtaccaaacggaacgatagtgaaaacaatcacgaatgaccaaattgaagttactaatgctactgagctggttcagatttcctcaacaggtgaaatatgcgacagtccccatcagatccttgatggagaaaactgcacactaatagatgctctattgggagaccctcagtgtgatggcttccaaaataagaaatgggacctttttgttgaacgcagcaaagcctacagcaactgttacccttatgatgtgccggattatgcctcccttaggtcactagttgcctcatccggcacactggagtttaacaatgaaagcttcgattggactggagtcactcagaatggaacaagctctgcttgcaaaaggagatctgataaaagtttctttagtagattgaattggttgacccacttaaaatacaaatacccagcattgaacgtaactatgccaaacaatgaaaaatttgacaaattgtacatttggggggttcaccacccgggtacggacaatgaccaaatcagcctatatgctcaagcatcaggaagaatcacagtctctaccaaaagaagccaacaaactgtaatcccgaatatcggatctagacccagggtaagggatgtctccagccgaataagcatctattggacaatagtaaaaccgggagacatacttttgattaacagcacagggaatctaattgctcctcggggttacttcaaaatacgaagtgggaaaagctcaataatgagatcagatgcacccattggcaaatgcaattctgaatgcatcactccaaatggaagcattcccaatgacaaaccatttcaaaatgtaaacaggatcacatatggggcctgtcccagatatgttaagcaaaacactctgaaattggcaacagggatgcgaaatgtaccagagaaacaaactagaggcatatttggcgcaatcgcgggtttcatagaaaatggttgggagggaatggtggacggttggtacggtttcaggcatcaaaattctgagggcacaggacaagcagcagatctcaaaagcactcaagcagcaatcaaccaaatcaatgggaaactgaataggttaatcgggaaaacaaacgagaaattccatcagattgaaaaagaattctcggaagtagaaggaagaattcaggacctcgagaaatatgttgaggacactaaaatagatctctggtcatacaacgcggagcttcttgttgccctggagaaccaacatacaattgatctaactgactcagaaatgaacaaactgtttgaaagaacaaagaagcaactgagggaaaatgctgaggatatgggcaatggttgtttcaaaatataccacaaatgtgacaatgcctgcatagggtcaatcagaaatggaacttatgaccatgatgtgtacagagatgaagcattaaacaaccggttccagatcaaaggtgttgagctgaagtcaggatacaaagattggatcctatggatttcctttgccatatcatgttttttgctttgtgttgctttgttggggttcatcatgtgggcctgccaaaaaggcaacattaggtgcaacatttgcatttga

SEQ ID NO: 32380 - RNA, 1701 nt, synthetic construct; identical to SEQ ID NO: 32379
  misc_feature 1..1701: note = hemagglutinin__InfluenzaA__ABU92729
  source 1..1701: mol_type = other RNA

SEQ ID NO: 32381 - RNA, 1701 nt, synthetic construct; identical to SEQ ID NO: 32258
  misc_feature 1..1701: note = hemagglutinin__InfluenzaA__ABU92730
  source 1..1701: mol_type = other RNA

SEQ ID NO: 32382 - RNA, 1701 nt, synthetic construct
  misc_feature 1..1701: note = hemagglutinin__InfluenzaA__ABU92731
  source 1..1701: mol_type = other RNA
atgaagactatcattgctttgagctacattctatgtctggttttcgctcaaaaacttcccggaaatgacaacagcacggcaacgctgtgccttgggcaccatgcagtaccaaacggaacgatagtgaaaacaatcacgaatgaccaaattgaagttactaatgctactgagctggttcagagttcctcaacaggtggaatatgcgacagtcctcatcagatccttgatggagaaaactgcacactaatagatgctctattgggggaccctcagtgtgatggcttccaaaataagaaatgggacctttttgttgaacgcagcaaagcctacagcaactgttacccttatgatgtgccggattatgcctcccttaggtcactaattgcctcatccggcacactggagtttaacaatgaaagcttcaattggactggagtcactcaaaatggaacaagctctgcttgcaaaaggagatctaatagcagtttctttagtagattgaattggttgacccacttaaaattcaaatacccagcattgaacgtgactatgccaaacaatgaagaatttgacaaattgtacgtttggggggttcaccacccgggtacatacaatgaccaaatcagcctatatgctcaagcatcaggaagaatcacagtctctaccaaaagaagccaacaaactgtaatcccgaatatcgggtctagacccagggtaagggatatccccagcagaataagcatctattggacaatagtaaaaccgggagacatacttttgattaacagcacagggaatctaattgctcctcggggttacttcaaaatacgaagtgggaaaagctcaataatgagatcagatgcacccattggcaaatgcaattctgaatgcatcactccaaatggaagcattcccaatgacaaaccatttcaaaatgtaaacaggatcacatatggggcctgtcccagatatgttaagcaaaacactctgaaattggcaacagggatgcgaaatgtaccagagaaacaaactagaggcatatttggcgcaatcgcgggtttcatagaaaatggttgggagggaatggtggatggttggtacggtttcaggcatcaaaattctgagggaataggacaagcagcagatctcaaaagcactcaagcagcaatcgaccaaatcaatgggaagctgaataggttgatcgggaaaaccaacgagaaattccatcagattgaaaaagaattctcagaagtagaagggagaattcaggacctcgagaaatatgttgaggacactaaaatagatctctggtcatacaacgcggagcttcttgttgccctggagaaccaacatacaattgatctaactgactcagaaatgaacaaactgtttgaaagaacaaagaagcaactgagggaaaatgctgaggatatgggcaatggttgtttcaaaatataccacaaatgtgacaatgcctgcatagggtcaatcagaaatggaacttatgaccatgatgtatacagagatgaagcattaaacaaccggttccagatcaaaggtgttgagctgaagtcaggatacaaagattggatcctatggatttcctttgccatatcatgttttttgctttgtgttgctttgttggggttcatcatgtgggcctgccaaaaaggcaacattaggtgcaacatttgcatttga

SEQ ID NO: 32383 - RNA, 1701 nt, synthetic construct
  misc_feature 1..1701: note = hemagglutinin__InfluenzaA__ABU92732
  source 1..1701: mol_type = other RNA
atgaagactatcattgctttgagctacattctatgtctggttttcgctcaaaaacttcccggaaatgacaacagcacggcaacgctgtgccttgggcaccatgcagtaccaaacggaacgatagtgaaaacaatcacgaatgaccaaattgaagttactaatgctactgagctggttcagagttcctcaacaggtggaatatgcgacagtcctcatcagatccttgatggagaaaactgcacactaatagatgctctattgggagaccctcagtgtgatggcttccaaaataagaaatgggacctttttgttgaacgcagcaaagcctacagcaactgttacccttatgatgtgccggattatgcctcccttaggtcactaattgcctcatccggcacactggagtttaacaatgaaagcttcaattggactggagtcactcaaaatggaacaagctctgcttgcaaaaggagatctaatagcagtttctttagtagattgaattggttgacccacttaaaattcaaatacccagcattgaacgtgactatgccaaacaatgaagaatttgacaaattgtacatttggggggttcaccacccgggtacatacaatgaccaaatcagcctatatgctcaagcatcaggaagaatcacagtctctaccaaaagaagccaacaaactgtaatcccgaatatcgggtctagacccagggtaagggatatccccagcagaataagcatctattggacaatagtaaaaccgggagacatacttttgattaacagcacagggaatctaattgctcctcggggttacttcaaaatacgaagtgggaaaagctcaataatgagatcagatgcacccattggcaaatgcaattctgaatgcatcactccaaatggaagcattcccaatgacaaaccatttcaaaatgtaaacaggatcacatatggggcctgtcccagatatgttaagcaaaacactctgaaattggcaacagggatgcgaaatgtaccagagaaacaaactagaggcatatttggcgcaatcgcgggtttcatagaaaatggttgggagggaatggtggatggttggtacggtttcaggcatcaaaattctgagggaataggacaagcagcagatctcaaaagcactcaagcagcaatcgaccaaatcaatgggaagctgaataggttgatcgggaaaaccaacgagaaattccatcagattgaaaaagaattctcagaagtagaagggagaattcaggacctcgagaaatatgttgaggacactaaaatagatctctggtcatacaacgcggagcttcttgttgccctggagaaccaacatacaattgatctaactgactcagaaatgaacaaactgtttgaaagaacaaagaagcaactgagggaaaatgctgaggatatgggcaatggttgtttcaaaatataccacaaatgtgacaatgcctgcatagggtcaatcagaaatggaacttatgaccatgatgtatacagagatgaagcattaaacaaccggttccagatcaaaggtgttgagctgaagtcaggatacaaagattggatcctatggatttcctttgccatatcatgttttttgctttgtgttgttttgttggggttcatcatgtgggcctgccaaaaaggcaacattaggtgcaacatttgcatttga

SEQ ID NO: 32384 - RNA, 1701 nt, synthetic construct
  misc_feature 1..1701: note = hemagglutinin__InfluenzaA__ABU92733
  source 1..1701: mol_type = other RNA
atgaagactatcattgctttgagctacattctatgtctggttttcgctcaaaaacttcccggaaatgacaacagcacggcaacgctgtgccttgggcaccatgcagtaccaaacggaacgatagtgaaaacaatcacgaatgaccaaattgaagttactaatgctactgagctggttcagagttcctcaacaggtggaatatgcgacagtcctcatcagatccttgatggagaaaactgcacactaatagatgctctattgggagaccctcagtgtgatggcttccaaaataagaaatgggacctttttattgaacgcagcaaagcctacagcaactgttacccttatgatgtgccggattatgcctcccttaggtcactagttgcctcatccggcacactggaatttaacaatgaaagcttcaattggactggagtcactcaaaatggaacaagctctgcttgcaaaaggagatctaataacagtttctttagtagattgaattggttgacccacttaaaattcaaatacccagcattgaacgtgactatgccaaacaatgaaaaatttgacaaattgtacatttggggggttcaccacccgggtacggacaatgaccaaatcagcctatatgctcaagcttcaggaagaatcacagtctctaccaaaagaagccaacaaactgtaatcccgaatatcggatctagacccagggtaagggatatccccagcagaataagcatctattggacaatagtaaaaccgggagacatacttttgattaacagcacagggaatctaattgctcctcggggttacttcaaaatacgaagtgggaaaagctcaataatgagatcagatgcacccattggcaaatgcaattctgaatgcatcactccaaatggaagcattcccaatgacaaaccatttcaaaatgtaaacaggatcacatatggggcctgtcccagatatgttaagcaaaacactctgaaattggcaacagggatgcgaaatgtaccagagaaacaaactagaggcatatttggcgcaatcgcgggtttcatagaaaatggttgggagggaatggtggatggttggtacggtttcaggcatcaaaattctgagggaataggacaagcagcagatctcaaaagcactcaagcagcaatcaaccaaatcaatgggaagctgaataggttgatcgggaaaaccaacgagaaattccatcagattgaaaaagaattctcagaagtagaagggagaattcaggacctcgagaaatatgttgaggacactaaagtagatctctggtcatacaacgcggagcttcttgttgccctggagaaccaacatacaattgatctaactgactcagaaatgaacaaactgtttgaaagaacaaagaagcaactgagggaaaatgctgaggatatgggcaatggttgtttcaaaatataccacaaatgtgacaatgcctgcatagggtcaatcagaaatggaacttataaccatgatgtatacagagatgaagcattgaacaaccggttccagatcaaaggtgttgagctgaagtcaggatacaaagattggatcctatggatttcctttgccatatcatgttttttgctttgtgttgctttgttgggattcatcatgtgggcctgccaaaaaggcaacattaggtgcaacatttgcatttga

SEQ ID NO: 32385 - RNA, 1701 nt, synthetic construct
  misc_feature 1..1701: note = hemagglutinin__InfluenzaA__ABU92734
  source 1..1701: mol_type = other RNA
atgaagactatcattgctttgagctacattctatgtctggttttcgctcaaaaacttcccggaaatgacaacagcacggcaacgctgtgccttgggcaccatgcagtaccaaacggaacgatagtgaaaacaatcacgaatgaccaaattgaagttactaatgctactgagctggttcagagttcctcaacaggtggaatatgcgacagtcctcatcagatccttgatggagaaaactgcacactaatagatgctctattgggagaccctcagtgtgatggcttccaaaataagaaatgggacctttttgttgaacgcagcaaagcctacagcaactgttacccttatgatgtgccggattatgcctcccttaggtcactaattgcctcatccggcacactggagtttaacaatgaaagcttcaattggactggagtcactcaaaatggaacaagctctgcttgcaaaaggagatctaatagcagtttctttagtagattgaattggttgacccacttaaaattcaaatacccagcattgaacgtgactatgccaaacaatgaagaatttgacaaattgtacatttggggggttcaccacccgggtacagacaatgaccaaatcagcctatatgctcaagcatcaggaagaatcacagtctctaccaaaagaagccaacaaactgtaatcccgaatatcggatctagacccagggtaagggatatccccagcagaataagcatctattggacaatagtaaaaccgggagacatacttttgattaacagcacagggaatctaattgctcctcggggttacttcaaaatacgaagtgggaaaagctcaataatgagatcagatgcacccattggcaaatgcaattctgaatgcatcactccaaatggaagcattcccaatgacaaaccatttcaaaatgtaaacaggatcacatatggggcctgtcccagatatgttaagcaaaacactctgaaattggcaacagggatgcgaaatgtaccagagaaacaaactagaggcatatttggcgcaatcgcgggtttcatagaaaatggttgggagggaatggtggatggttggtacggtttcaggcatcaaaattctgagggaataggacaagcagcagatctcaaaagcactcaagcagcaatcgaccaaatcaatgggaagctgaataggttgatcgggaaaaccaacgagaaattccatcagattgaaaaagaattctcagaagtagaagggagaattcaggacctcgagaaatatgttgaggacactaaaatagatctctggtcatacaacgcggagcttcttgttgccctggagaaccaacatacaattgatctaactgactcagaaatgaacaaactgtttgaaagaacaaagaagcaactgagggaaaatgctgaggatatgggcaatggttgtttcaaaatataccacaaatgtgacaatgcctgcatagggtcaatcagaaatggaacttatgaccatgatgtatacagagatgaagcattaaacaaccggttccaaatcaaaggtgttgagctgaagtcaggatacaaagattggatcctatggatttcctttgccatatcatgttttttgctttgtgttgctttgttggggttcatcatgtgggcctgccaaaaaggcaacattaggtgcaacatttgcatttga

SEQ ID NO: 32386 - RNA, 1701 nt, synthetic construct
  misc_feature 1..1701: note = hemagglutinin__InfluenzaA__ABU92735
  source 1..1701: mol_type = other RNA
atgaagactatcattgctttgagctacattctatgtctggttttcgctcaaaaacttcccggaaatgacaacagcacggcaacgctgtgccttgggcaccatgcagtaccaaacggaacgatagtgaaaacaatcacgaatgaccaaattgaggttactaatgctactgagctggttcagagttcctcaacaggtggaatatgcggcagtcctcatcagatccttgatggagaaaactgcacactaatagatgctctattgggagaccctcagtgtgatggcttccaaaataagaaatgggacctttttgttgaacgcagcaaagcctacagcaactgttacccttatgatgtgccggattatgcctcccttaggtcactagttgcctcatccggcacactggagtttaacaatgaaagcttcaattggactggagtcactcaaaatggaacaagctctgcttgcaaaaggagatctaataacagtttctttagtagattgaattggttgacccatttaaaattcaaatacccagcattgaacgtgactatgccaaacaatgaaaaatttgacaaattgtacatttggggagttcaccacccgggtacggacaatgaccaaatcagcctatatgctcaagcaccagcaagaatcacagtctctaccaaaagaagccaacaaactgtaatcccgaatatcggatctagacccagggtaagggatatccccagcagaataagcatctattggacaatagtaaaaccgggagacatacttttgattaacagcacagggaatctaattgctcctcggggttacttcaaaatactaagtgggaaaagctcaataatgagatcagatgcacccattggcaaatgcaattctgaatgcatcactccaaatggaagcattcccaatgacaaaccatttcaaaatgtaaacaggatcacatatggggcctgtcccagatatgttaagcaaaacactctgaaattggcaacaggaatgcgaaatgtaccagagaaacaaactagaggcatatttggcgcaatcgcgggtttcatagaaaatggttgggagggaatggtggatggttggtacggtttcaggcatcaaaattctgagggaataggacaagcagcagatctcaaaagcactcaagcagcaatcaaccaaatcaatgggaagctgaataggttgatcgggaaaaccaacgagaaattccatcagattgaaaaagaattctcagaagtagaagggagaattcaggacctcgagaaatatgttgaggacactaaaatagatctctggtcatacaacgcggagcttcttgttgccctggagaaccaacatacaattgatctaactgactcagaaatgaacaaactgtttgaaagaacaaagaagcaactgagggaaaatgctgaggatatgggcaatggttgtttcaaaatataccacaaatgtgacaatgcctgcatagggtcaatcagaaatggaacttatgaccatgatgtatacagagatgaagcattaaacaaccggttccagatcaaaggtgttgagctgaagtcaggatacaaagattggatcctatggatttcctttgccatgtcatgttttttgctttgtgttgctttgttggggttcatcatgtgggcctgccaaaaaggcaacattaggtgcaacatttgcatttga

SEQ ID NO: 32387 - RNA, 1701 nt, synthetic construct; identical to SEQ ID NO: 32332
  misc_feature 1..1701: note = hemagglutinin__InfluenzaA__ABU92737
  source 1..1701: mol_type = other RNA

SEQ ID NO: 32388 - RNA, 1701 nt, synthetic construct
  misc_feature 1..1701: note = hemagglutinin__InfluenzaA__ABU92738
  source 1..1701: mol_type = other RNA
atgaagactatcattgctttgagctacattctatgtctggttttcgctcaaaaacttcccggaaatgacaacagcacggcaacgctgtgccttgggcaccatgcagtaccaaacggaacgatagtgaaaacaatcacgaacgaccaaattgaagttactaatgctactgaactggttcaaagttcctcaacaggtggaatatgcgacagtcctcatcagatccttgatggagaaaactgcacactaatagatgctctattgggagaccctcagtgtgatggcttccaaaataagaaatgggacctttttgttgaacgcagcaaagcctacagcaactgttacccttatgatgtgccggattatgcctcccttaggtcactaattgcctcatccggcacactggagtttaacaatgaaagcttcaattggactggagtcactcaaaatggaacaagctctgcttgcaaaaggagatctaataacagtttctttagtagattgaattggttgacccacttaaaattcaaatacccagcattgaacgtgactatgccaaacaatgaaaaatttgacaaattgtacatttggggggttcaccacccgggtacggacaatgaccaaatcagcctatatgctcaagcaccaggaagaatcacagtctctaccaaaagaagccaacaaactgtaattccgaatatcggatctagaccccgagtaagggatatccccagcagaataagcatctattggacaatagtaaaaccgggagacatacttttgattaacagcacagggaatctaattgctcctcggggttacttcaaaatacgaagtgggaaaagctcgataatgagatcagatgcacccattggcaaatgcaattctgaatgcatcactccaaatggaagcattcccaatgacaaaccatttcaaaatgtaaacaggatcacatatggggcctgtcccagatatgttaagcaaaacactctgaaattggcaacagggatgcgaaatgtaccagagaaacaaactcgaggcatatttggcgcaatcgcggggttcatagaaaatggttgggagggaatggtggatggttggtacggtttcaggcatcaaaattctgagggaataggacaagcagcagatctcaaaagcactcaagcagcaatcgatcaaatcaatgggaagctgaataggttgatcgggaaaaccaacgagaaattccatcagattgaaaaagaattctcagaagtagaagggagaattcaggacctcgagaaatatgttgaggacactaaaatagatctctggtcatacaacgcggagcttcttgttgccctggagaaccaacatacaattgacctaactgactcagaaatgaacaaactgtttgaaagaacaaagaagcaactgagggagaatgctgaggatatgggcaatggttgtttcaaaatataccacaaatgtgacaatgcctgcatagggtcaatcagaaatggaacttatgaccatgatgtatacagagatgaagcattaaacaaccggttccagatcaaaggtgttgagctgaagtcaggatacaaagattggatcctatggatttcctttgccatatcatgttttttgctttgtgttgttttgttggggttcatcatgtgggcctgccaaaaaggcaacattaggtgcaacatttgcatttga

SEQ ID NO: 32389 - RNA, 1701 nt, synthetic construct
  misc_feature 1..1701: note = hemagglutinin__InfluenzaA__ABU92739
  source 1..1701: mol_type = other RNA
atgaagactatcattgctttgagctacattctatgtctggttttcgctcaaaaacttcccggaaatgacaacagcacggcaacgctgtgccttgggcaccatgcagtaccaaacggaacgatagtgaaaacaatcacgaatgaccaaattgaagttactaatgctactgagctggttcagatttcctcaacaggtgaaatatgcgacagtccccatcagatccttgatggagaaaactgcacactaatagatgctctattgggagaccctcagtgtgatggcttccaaaataagaaatgggacctttttgttgaacgcagcaaagcctacagcaactgttacccttatgatgtgccggattatgcctcccttaggtcactagttgcctcatccggcacactggagtttaacaatgaaagctttgattggactggagtcactcagaatggaacaagctctgcttgcaaaaggagatctgataaaagtttctttagtagattgaattggttgacccacttaaaatacaaatacccagcattgaacgtaactatgccaaacaatgaaaaatttgacaaattgtacatttggggggttcaccacccgggtacggacagtgaccaaatcagcctatatgctcaagcatcaggaagaatcacagtctctaccaaaagaagccaacaaactgtaatcccgaatatcggatctagacccagggtaagggatgtctccagccgaataagcatctattggacaatagtaaaaccgggagacatacttttgattaacagcacagggaatctaattgctcctcggggttacttcaaaatacgaagtgggaaaagctcaataatgagatcagatgcacccatcggcaaatgcaattctgaatgcatcactccaaatggaagcattcccaatgacaaaccatttcagaatgtaaacaggatcacatatggggcctgtcccaggtatgttaagcaaaacactctgaaattggcaacagggatgcgaaatgtaccagagaaacaaactagaggcatatttggcgcaatcgcgggtttcatagaaaatggttgggagggaatggtggacggttggtacggtttcaggcatcaaaattctgagggcacaggacaagcagcagatctcaaaagcactcaagcagcaatcaaccaaatcaatgggaaactgaataggttaatcgggaaaacaaacgagaaattccatcagattgaaaaagaattctcggaagtagaaggaagaattcaggacctcgagaaatatgttgaggacactaaaatagatctctggtcatacaacgcggagcttcttgttgccctggagaaccaacatacaattgatctaactgactcagaaatgaacaaactgtttgaaagaacaaagaagcaactgagggaaaatgctgaggatatgggcaatggttgtttcaaaatataccacaaatgtgacaatgcctgcatagggtcaatcagaaatggaacttatgaccatgatgtgtacagagatgaagcattaaacaaccggttccagatcaaaggtgttgagttgaagtcaggatacaaagattggatcctatggatttcctttgccatatcatgttttttgctttgtgttgctttgttggggttcatcatgtgggcctgccaaaaaggcaacattaggtgcaacatttgcatttga

SEQ ID NO: 32390 - RNA, 1701 nt, synthetic construct
  misc_feature 1..1701: note = hemagglutinin__InfluenzaA__ABU92740
  source 1..1701: mol_type = other RNA
atgaagactatcattgctttgagctacattctatgtctggttttcgcccaaaaacttcccggaaatgacaacagcacggcaacgctgtgccttgggcaccatgcagtaccaaacggaacgatagtgaaaacaatcacgaatgaccaaattgaagttactaatgctactgagctggttcagagttcctcaacaggtgaaatatgcgacagtcctcatcagatccttgatggagaaaactgcacactaatagatactctattgggagaccctcagtgtgatggcttccaaaataagaaatgggacctttttgttgaacgcagcaaagcctacagcaactgttacccttatgatgtgccggattatgcctcccttaggtcactagttgcctcatccggcacactggagtttaacaatgaaagcttcaattggactggagtcactcaaaatggaacaagctctgcttgcaaaaggagatctaataacagtttctttagtagattgaattggttgacccacttaaaattcaaatacccagcattgaacgtgactatgccaaacaatgaaaaatttgacaaattgtacatttggggggttcaccacccgggtacggacaatgaccaaatcttcctgtatgctcaagcatcaggaagaatcacagtctctaccaaaagaagccaacaaactgtaatcccgaatatcggatctagacccagagtaaggaatatccccagcagaataagcatctattggacaatagtaaaaccgggagacatacttttgattaacagcacagggaatctaattgctcctaggggttacttcaaaatacgaagtgggaaaagctcaataatgagatcagatgcacccattggcaaatgcaattctgaatgcatcactccaaatggaagcattcccaatgacaaaccatttcaaaatgtaaacaggatcacatatggggcctgtcccagatatgttaagcaaaacactctgaaattggcaacagggatgcgaaatgtaccagagaaacaaactagaggcatatttggcgcaatcgcgggtttcatagaaaatggttgggagggaatggtggatggttggtacggtttcaggcatcaaaattctgagggaataggacaagcagcagatctcaaaagcactcaagcagcaatcaatcaaatcaatgggaagctgaataggttgatcgggaaaaccaacgagaaattccatcagattgaaaaagaattctcagaagtagaagggagaattcaggacctcgagaaatatgttgaggacactaaaatagatctctggtcatacaacgcggagcttcttgttgccctggagaaccaacatacaattgatctaactgactcagaaatgaacaaactgtttgaaagaacaaagaagcaactgagggaaaatgctgaggatatgggcaatggttgtttcaaaatataccacaaatgtgacaatgcctgcataggatcaatcagaaatggaacttatgaccatgatgtttacagagatgaagcattaaacaaccggttccagatcaaaggcgttgagctgaagtcaggatacaaagattggatcctatggatttcctttgccatatcatgttttttgctttgtgttgctttgttggggttcatcatgtgggcctgccaaaaaggcaacattaggtgcaacatttgcatttga

SEQ ID NO: 32391 - RNA, 1701 nt, synthetic construct
  misc_feature 1..1701: note = hemagglutinin__InfluenzaA__ABU92741
  source 1..1701: mol_type = other RNA
atgaagactatcattgctttgagctacattctatgtctggttttcgctcaaaaacttcccggaaatgacaacagcacggcaacgctgtgccttgggcaccatgcagtaccaaacggaacgatagtgaaaacaatcacgaacgaccaaattgaagttactaatgctactgaactggttcaaagttcctcaacaggtggaatatgcgacagtcctcatcagatccttgatggagaaaactgcacactaatagatgctctattgggagaccctcagtgtgatggcttccaaaataagaaatgggacctttttgttgaacgcagcaaagcctacagcaactgttacccttatgatgtgccggattatgcctcccttaggtcactaattgcctcatccggcacactggagtttaacaatgaaagcttcaattggactggagtcactcaaaatggaacaagctctgcttgcaaaaggagatctaataacagtttctttagtagattgaattggttgacccacttaaaattcaaatacccagcattgaacgtgactatgccaaacaatgaagaatttgacaaattgtacatttggggggttcaccacccgggtacggacaatgaccaaatcagcctatatgctcaagcaccaggaagaatcacagtctctaccaaaagaagccaacaaactgtaattccgaatatcggatctagaccccgagtaagggatatccccagcagaataagcatctattggacaatagtaaaaccgggagacatacttttgattaacagcacagggaatctaattgctcctcggggttacttcaaaatacgaagtgggaaaagctcgataatgagatcagatgcacccattggcaaatgcaattctgaatgcatcactccaaatggaagcattcccaatgacaaaccatttcaaaatgtaaacaggatcacatatggggcctgtcccagatatgttaagcaaaacactctgaaattggcaacagggatgcgaaatgtaccagagaaacaaactcgaggcatatttggcgcaatcgcggggttcatagaaaatggttgggagggaatggtggatggttggtacggtttcaggcatcaaaattctgagggaataggacaagcagcagatctcaaaagcactcaagcagcaatcgaccaaatcaatgggaagctgaataggttgatcgggaaaaccaacgagaaattccatcagattgaaaaagaattctcagaagtagaagggagaattcaggacctcgagaaatatgttgaggacactaaaatagatctctggtcatacaacgcggagcttcttgttgccctggagaaccaacatacaattgatctaactgactcagaaatgaacaaactgtttgaaagaacaaagaagcaactgagggagaatgctgaggatatgggcaatggttgtttcaaaatataccacaaatgtgacaatgcctgcatagggtcaatcagaaatggaacttatgaccatgatatatacagagatgaagcattaaacaaccggttccagatcaaaggtgttgagctgaagtcaggatacaaagattggatcctatggatttcctttgccatatcatgttttttgctttgtgttgttttgttggggttcatcatgtgggcctgccaaaaaggcaacattaggtgcaacatttgcatttga

SEQ ID NO: 32392 - RNA, 1701 nt, synthetic construct
  misc_feature 1..1701: note = hemagglutinin__InfluenzaA__ABU92742
  source 1..1701: mol_type = other RNA
atgaagactatcattgctttgagctacattctatgtctggttttcgctcaaaaacttcccggaaatgacaacagcacggcaacgctgtgccttgggcaccatgcagtaccaaacggaacgatagtgaaaacaatcacgaatgaccaaattgaagttactaatgctactgagctggttcagagttcctcaacaggtggaatatgcgacagtcctcatcagatccttgatggagaaaactgcacactaatagatgctctattgggagaccctcagtgtgatggcttccaaaataagaaatgggacctttttgttgaacgcagcaaagcctacagcaactgttacccttatgatgtgccggattatgcctcccttaggtcactagttgcctcatccggcacactggagtttaacaatgaaagcttcaattggactggagtcactcaaaacggaacaagctctgcttgcaaaaggagatctaataacagtttctttagtagattgaattggttgacccacttaaaattcaaatacccagcattgaacgtgactatgccaaacaatgaaaaatttgacaaattgtacatttggggggttcaccacccgggtacggacaatgaccaaatcttcctgtatgctcaagcatcaggaagaatcacagtctctaccaaaagaagccaacaaactgtaatcccgaatatcggatctagacccagagtaaggaatatccccagcagaataagcatctattggacaatagtaaaaccaggagacatacttttgattaacagcacagggaatctaattgctcctaggggttacttcaaaatacgaagtgggaaaagctcaataatgagatcagatgcacccattggcaaatgcaattctgaatgcatcactccaaatggaagcattcccaatgacaaaccatttcaaaatgtaaacaggatcacatacggggcctgtcccagatatgttaagcaaaacactctgaaattggcaacagggatgcgaaatgtaccagagaagcaaactagaggcatatttggcgcaatcgcgggtttcatagaaaatggttgggagggaatggtggatggttggtacggtttcaggcatcaaaattctgagggaataggacaagcagcagatctcaaaagcactcaagcagcaatcgatcaaatcaatgggaagctgaataggttgatcgggaaaaccaacgagaaattccatcagattgaaaaagaattctcagaagtagaagggagaattcaggacctcgagaaatatgttgaggacactaaaatagatctctggtcatacaacgcggagcttcttgttgccctggagaaccaacatacaattgatctaactgactcagaaatgaacaaactgtttgaaaaaacaaagaagcaactgagggaaaatgctgaggatatgggcaatggttgtttcaaaatataccacaaatgtgacaatgcctgcataggatcaatcagaaatggaacttatgaccatgatgtatacagagatgaagcattaaacaaccggttccagatcaagggcgttgagctgaagtcaggatacaaagattggatcctatggatttcctttgccatatcatgttttttgctttgtgttgctttgttggggttcatcatgtgggcctgccaaaaaggcaacattaggtgcaacatttgcatttga

SEQ ID NO: 32393 - RNA, 1701 nt, synthetic construct
  misc_feature 1..1701: note = hemagglutinin__InfluenzaA__ABU92743
  source 1..1701: mol_type = other RNA
atgaagactatcattgctttgagctacattctatatctggttttcgctcaaaaacttcccgaaaatgacaacagcacggcaacgctgtgccttgggcaccatgcagtaccaaacggaacgatagtgaaaacaatcacgaatgaccaaattgaagttactaatgctactgagctggttcagagttcctcaacaggtggaatatgcgacagtcctcatcagatccttgatggagaaaactgcacactaatagatgctctattgggagaccctcagtgtgatggcttccaaaataagaaatgggacctttttgttgaacgcagcaaagcctacagcaactgttacccttatgatgtgccggattatgcctcccttaggtcactagttgcctcatccggcacactggagtttaacaatgaaagcttcaattggactggagtcactcaaaacggaacaagctctgcttgcaaaaggagatctaataacagtttctttagtagattgaattggttgacccacttaaaattcaaatacccagcattgaacgtgactatgccaaacaatgaaaaatttgacaaattgtacatttggggggttcaccacccgggtacggacaatgaccaaatcttcctgtatgctcaagcatcaggaagaatcacagtctctaccaaaagaagccaacaaactgtaatcccgaatatcggatctagacccagagtaaggaatatccccagcagaataagcatctattggacaatagtaaaaccgggagacatacttttgattaacagcacagggaatctaattgctcctaggggttacttcaaaatacgaagtgggaaaagctcaataatgagatcagatgcacccattggcaaatgcaattctgaatgcatcactccaaatggaagcattcccaatgacaaaccatttcaaaatgtaaacaggatcacatatggggcctgtcccagatatgttaagcaaaacactctgaaattggcaacagggatgcgaaatgtaccagagaaacaaactagaggcatatttggcgcaatcgcgggtttcatagaaaatggttgggagggaatggtggatggttggtacggtttcaggcatcaaaattctgagggaataggacaagcagcagatctcaaaagcactcaagcagcaatcgatcaaatcaatgggaagctgaataggttgatcgggaaaaccaacgagaaattccatcagattgaaaaagaattctcagaagtagaagggagaattcaggacctcgagaaatatgttgaggacactaaaatagatctctggtcatacaacgcggagcttcttgttgccctggagaaccaacatacaattgatctaactgactcagaaatgaacaaactgtttgaaaaaacaaagaagcaactgagggaaaatgctgaggatatgggcaatggttgtttcaaaatataccacaaatgtgacaatgcctgcataggatcaatcagaaatggaacttatgaccatgatgtatacagagatgaagcattaaacaacaggttccagatcaagggcgttgagctgaagtcaggatacaaagattggatcctatggatttcctttgccatatcatgttttttgctttgtgttgctttgttggggttcatcatgtgggcctgccaaaaaggcaacattaggtgcaacatttgcatttga

SEQ ID NO: 32394 - RNA, 1701 nt, synthetic construct; identical to SEQ ID NO: 32354
  misc_feature 1..1701: note = hemagglutinin__InfluenzaA__ABU92744
  source 1..1701: mol_type = other RNA

SEQ ID NO: 32395 - RNA, 1701 nt, synthetic construct
  misc_feature 1..1701: note = hemagglutinin__InfluenzaA__ABU92745
  source 1..1701: mol_type = other RNA
atgaagactatcattgctttgagctacattctatgtctggttttcgctcaaaaacttcccggaaatgacaacagcacggcaacgctgtgccttgggcaccatgcagtaccaaacggaacgatagtgaaaacaatcacgaacgaccaaattgaagttactaatgctactgaactggttcaaagttcctcaacaggtggaatatgcgacagtcctcatcagatccttgatggagaaaactgcacactaatagatgctctattgggagaccctcagtgtgatggcttccaaaataagaaatgggacctttttgttgaacgcagcaaagcctacagcaactgttacccttatgatgtgccggattatgcctcccttaggtcactaattgcctcatccggcacactggagtttaacaatgaaagcttcaattggactggagtcactcaaaatggaacaagctctgcttgcaaaaggagatctaataacagtttctttagtagattgaattggttgacccacttaaaattcaaatacccagcattgaacgtgactatgccaaacaatgaagaatttgacaaattgtacatttggggggttcaccacccgggtacggacaatgaccaaatcagcctatatgctcaagcaccaggaagaatcacagtctctaccaaaagaagccaacaaactgtaattccgaatatcggatctagaccccgagtaagggatatccccagcagaataagcatctattggacaatagtaaaaccgggagacatacttttgattaacagcacagggaatctaattgctcctcggggttacttcaaaatacgaattgggaaaagctcgataatgagatcagatgcacccattggcaaatgcaattctgaatgcatcactccaaatggaagcattcccaatgacaaaccatttcaaaatgtaaacaggatcacatatggggcctgtcccagatatgttaagcaaaacactctgaaattggcaacagggatgcgaaatgtaccagagaaacaaactcgaggcatatttggcgcaatcgcggggttcatagaaaatggttgggagggaatggtggatggttggtacggtttcaggcatcaaaattctgagggaatagggcaagcagcagatctcaaaagcactcaagcagcaatcgaccaaatcaatgggaagctgaataggttgatcgggaaaaccaacgagaaattccatcagattgaaaaagaattctcagaagtagaagggagaattcaggacctcgagaaatatgttgaggacactaaaatagatctctggtcatacaacgcggagcttcttgttgccctggagaaccaacatacaattgatctaactgactcagaaatgaacaaactgtttgaaagaacaaagaagcaactgagggagaatgctgaggatatgggcaatggttgtttcaaaatataccacaaatgtgacaatgcctgcatagggtcaatcagaaatggaacttatgaccatgatgtatacagagatgaagcattaaacaaccggttccagatcaaaggtgttgagctgaagtcaggatacaaagattggatcctatggatttcctttgccatatcatgttttttgctttgtgttgttttgttggggttcatcatgtgggcctgccaaaaaggcaacattaggtgcaacatttgcatttga

SEQ ID NO: 32396 - RNA, 1701 nt, synthetic construct
  misc_feature 1..1701: note = hemagglutinin__InfluenzaA__ABU92746
  source 1..1701: mol_type = other RNA
atgaagactatcattgctttgagctacattctatgtctggttttcgctcaaaaacttcccggaaatgacaacagcacggcaacgctgtgccttgggcaccatgcagtaccaaacggaacgatagtgaaaacaatcacgaatgaccaaattgaagttactaatgctactgagctggttcagagttcctcaacaggtggaatatgcgacagtcctcatcagatccttgatggagaaaactgcacactaatagatgctctattgggagaccctcagtgtgatggcttccaaaataagaaatgggacctttttgttgaacgcagcaaagcctacagcaactgttacccttatgatgtgccggattatgcctcccttaggtcactagttgcctcatccggcacactggagtttaacaatgaaagcttcaattggactggagtcactcaaaatggaacaagctctgcttgcaaaaggagatctaataacagtttctttagtagattgaattggttgacccacttaaaattcaaatacccagcattgaacgtgactatgccaaacaatgaaaaatttgacaaattgtacatttggggggttcaccacccgggtacggacaatgaccaaatcttcctgtatgctcaagcatcaggaagaatcacagtctctaccaaaagaagccaacaaactgtaatcccgaatatcggatctagacccagagtaaggaatatccccagcagaataagcatctattggacaatagtaaaaccgggagacatacttttgattaacagcacagggaatctaattgctcctaggggttacttcaaaatacgaagtgggaaaagctcaataatgagatcagatgcacccattggcaaatgcaattctgaatgcatcactccaaatggaagcattcccaatgacaaaccatttcaaaatgtaaacaggatcacatacggggcctgtcccagatatgttaagcaaaacactctgaaattggcaacagggatgcgaaatgtaccagagaaacaaactagaggcatatttggcgcaatcgcgggtttcatagaaaatggttgggagggaatggtggatggttggtacggtttcaggcatcaaaattctgagggaataggacaagcagcagatctcaaaagcactcaagcagcaatcgatcaaatcaatgggaagctgaataggttgatcgggaaaaccaacgagaaattccatcagattgaaaaagaattctcagaagtagaagggagaattcaggacctcgagaaatatgttgaggacactaaaatagatctctggtcatacaacgcggagcttcttgttgccctggagaaccaacatacaattgatctaactgactcagaaatgaacaaactgtttgaaaaaacaaagaagcaactgagggaaaatgctgaagatatgggcaatggttgtttcaaaatataccacaaatgtgacaatgcctgcataggatcaatcagaaatggaacttatgaccatgatgtatacagagatgaagcattaaacaaccggttccagatcaagggcgttgagctgaagtcaggatacaaagattggatcctatggatttcctttgccatatcatgttttttgctttgtgttgctttgttggggttcatcatgtgggcctgccaaaaaggcaacattaggtgcaacatttgcatttga

SEQ ID NO: 32397 - RNA, 1701 nt, synthetic construct; identical to SEQ ID NO: 32357
  misc_feature 1..1701: note = hemagglutinin__InfluenzaA__ABU92747
  source 1..1701: mol_type = other RNA

SEQ ID NO: 32398 - RNA, 1701 nt, synthetic construct
  misc_feature 1..1701: note = hemagglutinin__InfluenzaA__ABU92748
  source 1..1701: mol_type = other RNA
atgaagactatcattgctttgagctacattctatgtctggttttcgctcaaaaacttcccggaaatgacaacagcacggcaacgctgtgccttgggcaccatgcagtaccaaacggaacgatagtgaaaacaatcacgaatgaccaaattgaagttactaatgctactgagctggttcagagttcctcaacaggtgaaatatgcgacagtcctcatcagatccttgatggagaaaactgcacactaatagatgctctattgggagaccctcagtgtgatggcttccaaaataagaaatgggacctttttgttgaacgcagcaaagcctacagcaactgttacccttatgatgtgccggattatgcctcccttaggtcactagttgcctcatccggcacactggagtttaacaatgaaagcttcaattggactggagtcactcaaaatggaacaagctctgcttgcaaaaggagatctaataacagtttctttagtagactgaattggttgacccactcaaaattcaaatacccagcattgaacgtgactatgccaaacaatgaaaaatttgacaaattgtacatttggggggttcaccacccgggtacggacaatgaccaaaccttcttgtatgctcaagcatcaggaagaatcacagtctctaccaaaagaagccaacaaactgtaatcccgaatatcggatccagacctagagtaaggaatatccccagcagaataagcatctattggacaatagtaaaaccgggagacatacttttgattaacagcacagggaatctaattgctcctaggggttacttcaaaatacgaagtgggaaaagctcaataatgagatcagatgcacccattggtaaatgcaattctgaatgcatcactccaaatggaagcattcccaatgacaaaccatttcaaaatgtaaacagaatcacatatggggcctgtcccagatatgttaagcaaaacactctgaaattggcaacagggatgagaaatgtaccagagaaacaaactagaggcatatttggcgcaatcgcgggtttcatagaaaatggttgggagggaatggtggatggttggtacggtttcaggcatcaaaattctgagggaataggacaagcagcagatctcaaaagcactcaagcagcaatcaatcaaatcaatgggaagctgaataggttgatcgggaaaaccaacgagaaattccatcagattgaaaaagaattctcagaagtagaagggagaattcaggacctcgagaaatatgttgaggacactaaaatagatctctggtcatacaacgcggagcttcttgttgccctggagaaccaacatacaattgatctaactgactcagaaatgaacaaactgtttgaaagaacaaagaagcaactgagggaaaatgctgaggatatgggcaatggttgtttcaaaatataccacaaatgtgacaatgcctgcataggatcaatcagaaatggaacttatgaccatgatgtatacagagatgaagcattaaacaaccggttccagatcaaaggcgttgagctgaagtcaggatacaaagattggatcctatggatttcctttgccatatcatgttttttgctttgtgttgttttgttggggttcatcatgtgggcctgccaaaaaggcaacattaggtgcaacatttgcatttga

SEQ ID NO: 32399 - RNA, 1701 nt, synthetic construct; identical to SEQ ID NO: 32357
  misc_feature 1..1701: note = hemagglutinin__InfluenzaA__ABU92749
  source 1..1701: mol_type = other RNA

SEQ ID NO: 32400 - RNA, 1701 nt, synthetic construct
  misc_feature 1..1701: note = hemagglutinin__InfluenzaA__ABU92750
  source 1..1701: mol_type = other RNA
atgaagactatcattgctttgagctacattctatgtctggttttcgctcaaaaacttcccggaaatgacaaccgcacggcaacgctgtgccttgggcaccatgcagtaccaaacggaacgatagtgaaaacaatcacgaatgaccaaattgaagttactaatgctactgagctggttcagatttcctcaacaggtggaatatgcgacagtcctcatcagatccttgatggagaaaactgcacactaatagatgctctattgggagaccctcagtgtgatggcttccaaaataagaaatgggacctttttgttgaacgcagcaaagcctacagcaactgttacccttatgatgtgccggattatgcctcccttaggtcactagttgcctcatccggcacactggagtttaacaatgaaagcttcgattggactggagtcactcagaatggaacaagctctgcttgcaaaaggagatctaataaaagtttctttagtagattgaattggttgacccacttaaaatacaaatacccagcattgaacgtgactatgccaaacaatgaaaaatttgacaaattgtacatttggggggttcaccacccgggtacggacagtgaccaaatcagcctatatgctcaagcatcaggaagaatcacagtctctaccaaaagaagccaacaaactgtaatcccgaatatcggatctagacccagggtaagggatgtctccagccgaataagcatctattggacaatagtaaaaccgggagacatacttttgattaacagcacagggaatctaattgctcctcggggttacttcaaaatacgaagtgggaaaagctcaataatgagatcagatgcacccattggcaaatgcaattctgaatgcatcactccaaatggaagcattcccaatgacaaaccatttcaaaatgtaaacaggatcacatatggggcctgtcccagatatgttaagcaaaacactctgaaattggcaacagggatgcgaaatgtaccagagaaacaaactagaggcatatttggcgcaatcgcgggtttcatagaaaatggttgggagggaatggtggacggttggtacggtttcaggcatcaaaattctgagggcacaggacaagcagcagatctcaaaagcactcaagcagcaatcaaccaaatcaatgggaaactgaataggttaatcgggaaaacaaacgagaaattccatcagattgaaaaagaattctcggaagtagaaggaagaattcaggacctcgagaaatatgttgaggacactaaaatagatctctggtcatacaacgcggagcttcttgttgccctggagaaccaacatacaattgatctaactgactcagaaatgaacaaactgtttgaaagaacaaagaagcaactgagggaaaatgctgaggatatgggcaatggttgtttcaaaatataccacaaatgtgacaatgcctgcatagggtcaatcagaaatggaacttatgaccatgatgtgtacagagatgaagcattaaacaaccggttccagatcaaaggtgttgagctgaagtcaggatacaaagattggatcctatggatttcctttgccatatcatgttttttgctttgtgttgctttgttggggttcatcatgtgggcctgccagaaaggcaacattaggtgcaacatttgcatttga

SEQ ID NO: 32401 - RNA, 1701 nt, synthetic construct
  misc_feature 1..1701: note = hemagglutinin__InfluenzaA__ABU92751
  source 1..1701: mol_type = other RNA
atgaagactatcattgctttgagctacattctatgtctggttttcgctcaaaaacttcccggaaatgacaacagcacggcaacgctgtgccttgggcaccatgcagtaccaaacggaacgatagtgaaaacaatcacgaatgaccaaattgaagttactaatgctactgagctggttcagagttcctcaacaggtggaatatgcgacagtcctcatcagatccttgatggagaaaactgcacactaatagatgctctattgggagaccctcagtgtgatggcttccaaaataagaaatgggacctttttgttgaacgcagcaaagcctacagcaactgttacccttatgatgtgccggattatgcctcccttaggtcactagttgcctcatccggaacactggagtttaacaatgaaagcttcaattggactggagtcactcagaatggaacaagctctgcttgcaaaagaagatctaataaaagtttctttagtagattgaattggttgacccatttaaaatacaaatacccagcattgaacgtgactatgccaaacaatgaaaaatttgacaaattgtacatttggggggttcaccacccgggtacggacagtgaccaaatcagcctatatgctcaagcatcaggaagaatcacagtctctaccaaaagaagccaacaaactgtaatcccgaatatcggatctagacccagggtaagggatgtctccagcagaataagcatctattggacaatagtaaaaccgggagacatacttttgattaacagcacagggaatctaattgctcctcggggttacttcaaaatacgaagtgggaaaagctcaataatgagatcagatgcacccattggcaaatgcaattctgaatgcatcactccaaatggaagcattcccaatgacaaaccatttcaaaatgtaaacaggatcacatatggggcctgtcccagatatgttaagcaaaacactctgaaattggcaacagggatgcgaaatgtaccagagaaacaaactagaggcatatttggcgcaatcgcgggtttcatagaaaatggttgggagggaatggtggacggttggtacggtttcaggcatcaaaattctgagggcacaggacaagcagcagatctcaaaagcactcaagcagcaatcaaccaaatcaatgggaaactgaataggttaatcgggaaaacaaacgagaaattccatcagattgaaaaagaattctcagaagtagaagggagaattcaggacctcgagaaatatgttgaggacactaaaatagatctctggtcatacaacgcggagcttcttgttgccctggagaaccaacatacaattgatctaactgactcagaaatgaacaaactgtttgaaagaacaaagaagcaactgagggaaaatgctgaggatatgggcaatggttgtttcaaaatataccacaaatgtgacaatgcctgcatagggtcaatcagaaatggaacttatgaccatgatgtatacagagatgaagcattaaacaaccggttccagatcaaaggtgttgagctgaagtcaggatacaaagattggatcctatggatttcctttgccatatcatgttttttgctttgtgttgctttgttggggttcatcatgtgggcctgccaaaaaggcaacattaggtgcaacatttgcatttga

SEQ ID NO: 32402 - RNA, 1701 nt, synthetic construct
  misc_feature 1..1701: note = hemagglutinin__InfluenzaA__ABU92752
  source 1..1701: mol_type = other RNA
atgaagactatcattgctttgagctacattctatgtctggttttcgctcaaaaacttcccggaaatgacaacagcacggcaacgctgtgccttgggcaccatgcagtaccaaacggaacgatagtgaaaacaatcacgaatgaccaaattgaagttactaatgctactgagctggttcagatttcctcaacaggtgaaatatgcgacagtccccatcagatccttgatggagaaaactgcacactaatagatgccctattgggagaccctcagtgtgatggcttccaaaataagaaatgggacctttttgttgaacgcagcaaagcctacagcaactgttacccttatgatgtgccggattatgcctcccttaggtcactagttgcctcatccggcacactggagtttaacaatgaaagcttcgattggactggagtcactcagaatggaacaagctctgcttgcaaaaggagatctgacaaaagtttctttagtagattgaattggttgacccacttaaaatacaaatacccagcattgaacgtaaccatgccaaacaatgaaaaatttgacaaattgtacatttggggggttcaccacccgggtacggacagtgaccaaatcagcctatatgctcaagcatcaggaagaatcacagtctctaccaaaagaagccaacaaactgtaatcccgaatatcggatctagacccagggtaagggatgtctccagccgaataagcatctattggacaatagtaaaaccgggagacatacttttgattaacagcacagggaatctaattgctcctcggggttacttcaaaatacgaagtgggaaaagctcaataatgagatcagatgcacccattggcaaatgcaattctgaatgcatcactccaaatggaagcattcccaatgacaaaccatttcaaaatgtaaacaggatcacatatggggcctgtcccagatatgttaagcaaaacactctgaaattggcaacagggatgcgaaatgtaccagagaaacaaactagaggcatatttggcgcaatcgcgggtttcatagaaaatggttgggagggaatggtggacggttggtacggtttcaggcatcaaaattctgagggcacaggacaagcagcagatctcaaaagcactcaagcagcaatcaaccaaatcaatgggaaactgaataggttaatcgggaaaacaaacgagaaattccatcagattgaaaaagaattctcggaagtagaaggaagaattcaggacctcgagaaatatgttgaggacactaaaatagatctctggtcatacaacgcggagcttcttgttgccctggagaaccaacatacaattgatctaactgactcagaaatgaacaaactgtttgaaagaacaaagaagcaactgagggaaaatgctgaggatatgggcaatggttgtttcaaaatataccacaaatgtgacaatgcctgcatagggtcaatcagaaatggaacttatgaccatgatgtgtacagagatgaagcattaaacaaccggttccagatcaaaggtgttgagctgaagtcaggatacaaagattggatcctatggatttcctttgccatatcatgttttttgctttgtgttgctttgttggggttcatcatgtgggcctgccaaaaaggcaacattaggtgcaacatttgcatttga

SEQ ID NO: 32403 - RNA, 1701 nt, synthetic construct
  misc_feature 1..1701: note = hemagglutinin__InfluenzaA__ABU92753
  source 1..1701: mol_type = other RNA
atgaagactatcattgctttgagctacattctatgtctggttttcgctcaaaaacttcccggaaatgacaacagcacggcaacgctgtgccttgggcaccatgcagtaccaaacggaacgatagtgaaaacaatcacgaatgaccaaattgaagttactaatgctactgagctggttcagatttcctcaacaggtggaatatgcgacagtcctcatcagatccttgatggagaaaactgcacactaatagatgctctattgggagaccctcagtgtgatggcttccaaaataagaaatgggacctttttgttgaacgcagcaaagcctacagcaactgttacccttatgatgtgccggattatgcctcccttaggtcactagttgcctcatccggcacactggagtttaacaatgaaagcttcgattggactggagtcactcagaatggaacaagctctgcttgcaaaaggagatctaataaaagcttctttagtagattgaattggttgacccacttaaaatacaaatacccagcattgaacgtgactatgccaaacaatgaaaaatttgacaaattgtacatttggggggttcaccacccgggtacggacagtgaccaaatcagcctatatgctcaagcatcaggaagaatcacagtctctaccaaaagaagccaacaaactgtaatcccgaatatcggatctagacccagggtaagggatgtctccagccgaataagcatctattggacaatagtaaaaccgggagacatacttttgattaacagcacagggaatctaattgctcctcggggttacttcaaaatacgaagtgggaaaagctcaataatgagatcagatgcacccattggcaaatgcaattctgaatgcatcactccaaatggaagcattcccaatgacaaaccatttcaaaatgtaaacaggatcacatatggggcctgtcccagatatgttaagcaaaacactctgaaattggcaacagggatgcgaaatgtaccagagaaacaaactagaggcatatttggcgcaatcgcgggtttcatagaaaatggttgggagggaatggtggacggttggtacggtttcaggcatcaaaattctgagggcacaggacaagcagcagatctcaaaagcactcaagcagcaatcaaccaaatcaatgggaaactgaataggttaatcgggaaaacaaacgagaaattccatcagattgaaaaagaattctcggaagtagaaggaagaattcaggacctcgagaaatatgttgaggacactaaaatagatctctggtcatacaacgcggagcttcttgttgccctggagaaccaacatacaattgatctaactgactcagaaatgaacaaactgtttgaaagaacaaagaagcaactgagggaaaatgctgaggatatgggcaatggttgtttcaaaatataccacaaatgtgacaatgcctgcatagggtcaatcagaaatggaacttatgaccatgatgtgtacagagatgaagcattaaacaaccggttccagatcaaaggtgttgagctgaagtcaggatacaaagattggatcctatggatttcctttgccatatcatgttttttgctttgtgttgctttgttggggttcatcatgtgggcctgccaaaaaggcaacattaggtgcaacatttgcatttga

SEQ ID NO: 32404 - RNA, 1701 nt, synthetic construct; identical to SEQ ID NO: 32266
  misc_feature 1..1701: note = hemagglutinin__InfluenzaA__ABU92754
  source 1..1701: mol_type = other RNA

SEQ ID NO: 32405 - RNA, 1701 nt, synthetic construct
  misc_feature 1..1701: note = hemagglutinin__InfluenzaA__ABU92755
  source 1..1701: mol_type = other RNA
atgaagactatcattgctttgagctacattctatgtctggttttcgctcaaaaacttcccggaaatgacaacggcacggcaacactgtgccttgggcaccatgcagtaccaaacggaacgatagtgaaaacaatcacgaatgaccaaattgaagttactaatgctactgagctggttcagagttcctcaacaggtggaatatgcgacagtcctcatcagatccttgatggagaaaactgcacactaatagatgctctattgggagaccctcagtgtgatggcttccaaaataagaaatgggacctttttgttgaacgcagcaaagcctacagcaactgttacccttatgatgtgccggattatgcctcccttaggtcactagttgcctcatccggcacactggagtttaacaatgaaagcttcaattggactggagtcactcaaaatggaacaagctctgcttgcaaaaggagatctaataaaagtttctttagtagattgaattggttgacccacttaaaattcaaatacccagcattgaacgtgactatgccaaacaatgaaaaatttgacaaattgtacatttggggggttcaccacccgggtacggacaatgaccaaatcagcctatatgctcaagcatcaggaagaatcacagtctctaccaaaagaagccaacaaactgtaatcccgaatatcggatctagacccagggtaagggatgtccccagcagaataagcatctattggacaatagtaaaaccgggagacatacttttgattaacagcacagggaatctaattgctcctcggggttacttcaaaatacgaagtgggaaaagctcaataatgagatcagatgcacccattggcaaatgcaattctgaatgcatcactccaaatggaagcattcccaatgacaaaccatttcaaaatgtaaacaggatcacatatggggcctgtcccagatatgttaagcaaaacactctgaaattggcaacagggatgcgaaatgtaccagagaaacaaactagaggcatatttggcgcaatcgcgggtttcatagaaaatggttgggagggaatggtggacggttggtacggtttcaggcatcaaaatgctgagggaacaggacaagcagcagatctcaaaagcactcaagcagcaatcaaccaaatcaatgggaagctgaataggttgatcgggaaaacaaacgagaaattccatcagattgaaaaagaattctcagaagtagaaggaagaattcaggacctcgagaaatatgttgaggacactaaaatagatctctggtcatacaacgcggagcttcttgttgccctggagaaccaacatacaattgatctaactgactcagaaatgaacaaactgtttgaaagaacaaagaagcaactgagggaaaatgctgaggatatgggcaatggttgtttcaaaatataccacaaatgtgacaatgcctgcatagggtcaatcagaaatggaacttatgaccataatgtatacagagatgaagcattaaacaaccggttccagatcaaaggtgttgagctgaagtcaggatacaaagattggatcctatggatttcctttgccatatcatgttttttgctttgtgttgttttgttggggttcatcatgtgggcctgccaaaaaggcaacattaggtgcaacatttgcatttga

SEQ ID NO: 32406 - RNA, 1701 nt, synthetic construct
  misc_feature 1..1701: note = hemagglutinin__InfluenzaA__ABU92756
  source 1..1701: mol_type = other RNA
atgaagactatcattgctttgagctacattctatgtctggttttcgctcaaaaacttcccggaaatgacaacagcacggcaacgctgtgccttgggcaccatgcagtaccaaacggaacgatagtgaaaacaatcacgaatgaccaaattgaagttactaatgctactgagctggttcagatttcctcaacaggtggaatatgcgacagtcctcatcagatccttgatggagaaaactgcacactaatagatgctctattgggagaccctcagtgtgatggcttccaaaataagaaatgggacctttttgttgaacgcagcaaagcccacagcaactgttacccttatgatgtgccggattatgcctcccttaggtcactagttgcctcatccggcacactggagtttaacaatgaaagcttcgattggactggagtcactcagaatggaacaagctctgcttgcaaaaggagatctaataaaagtttctttagtagattgaattggttgacccacttaaaatacaaatacccagcattgaacgtgactatgccaaacaatgaaaaatttgacaaattgtacatttggggggttcaccacccgggtacggacagtgaccaaatcagcctatatgctcaagcatcaggaagaatcacagtctctaccaaaagaagccaacaaactgtaatcccgaatatcggatctagacccagggtaagggatgtctccagccgaataagcatctattggacaatagtaaaaccgggagacatacttttgattaacagcacagggaatctaattgctcctcggggctacttcaaaatacgaagtgggaaaagctcaataatgagatcagatgcacccattggcaaatgcaattctgaatgcatcactccaaatggaagcattcccaatgacaaaccatttcaaaatgtaaacaggatcacatatggggcctgtcccagatatgttaagcaaaacactctgaaattggcaacagggatgcgaaatgtaccagagaaacaaactagaggcatatttggcgcaatcgcgggtttcatagaaaatggttgggagggaatggtggacggttggtacggtttcaggcatcaaaattctgagggcacaggacaagcagcagatctcaaaagcactcaagcagcaatcaaccaaatcaatgggaaactgaataggttaatcgggaaaacaaacgagaaattccatcagattgaaaaagaattctcggaagtagaaggaagaattcaggacctcgagaaatatgttgaggacactaaaatagatctctggtcatacaacgcggagcttcttgttgccctggagaaccaacatacaattgatctaactgactcagaaatgaacaaactgtttgaaagaacaaagaagcaactgagggaaaatgctgaggatatgggcaatggttgtttcaaaatataccacaaatgtgacaatgcctgcatagggtcaatcagaaatggaacttatgaccatgatgtgtacagagatgaagcattaaacaaccggttccagatcaaaggtgttgagctgaagtcaggatacaaagattggatcctatggatttcctttgccatatcatgttttttgctttgtgttgctttgttggggttcatcatgtgggcctgccagaaaggcaacattaggtgcaacatttgcatttga

SEQ ID NO: 32407 - RNA, 1701 nt, synthetic construct
  misc_feature 1..1701: note = hemagglutinin__InfluenzaA__ABU92757
  source 1..1701: mol_type = other RNA
atgaagactatcattgctttgagctacattctatgtctggttttcgctcaaaaacttcccggaaatgacaacagcacggcaacgctgtgccttgggcaccatgcagtaccaaacggaacgatagtgaaaacaatcacgaatgaccaaattgaagttactaatgctactgagctggttcagatttcctcaacaggtgaaatatgcgacagtccccatcagatccttgatggagaaaactgcacactaatagatgctctattgggagaccctcagtgtgatggcttccaaaataagaaatgggacctttttgttgaacgcagcaaagcctacagcaactgttacccttatgatgtgccggattatgcctcccttaggtcactagttgcctcatccggcacactggagtttaacaatgaaagcttcgattggactggagtcactcagaatggaacaagctctgcttgcaaaaggagatctgataaaagtttctttagtagattgaattggttgacccacttaaaatacaaatacccagcattgaacgtaactatgccaaacaatgaaaaatttgacaaattgtacatttggggggttcaccacccgggtacggacagtgaccaaatcagcctatatgctcaagcatcaggaagaatcacagtctctaccaaaagaagccaacaaactgtaatcccgaatatcggatctagacccagggtaagggatgtctccagccgaataagcatctattggacaatagtaaaaccgggagacatacttttgattaacagcacagggaatctaattgctcctcggggttacttcaaaatacgaagggggaaaagctcaataatgagatcagatgcacccattggcaaatgcaattctgaatgcatcactccaaatggaagcattcccaatgacaaaccatttcaaaatgtaaacaggatcacatatggggcctgtcccagatatgttaagcaaaacactctgaaattggcaacagggatgcgaaatgtaccagagaaacaaactagaggcatatttggcgcaatcgcgggtttcatagaaaatggttgggagggaatggtggacggttggtacggtttcaggcatcaaaattctgagggcacaggacaagcagcagatctcaaaagcactcaagcagcaatcaaccaaatcaatgggaaactgaataggttaatcgggaaaacaaacgagaaattccatcagattgaaaaagaattctcggaagtagaaggaagaattcaggacctcgagaaatatgttgaggacactaaaatagatctctggtcatacaacgcggagcttcttgttgccctggagaaccaacatacaattgatctaactgactcagaaatgaacaaactgtttgaaagaacaaagaagcaactgagggaaaatgctgaggatatgggcaatggttgtttcaaaatataccacaaatgtgacaatgcctgcatagggtcaatcagaaatggaacttatgaccatgatgtgtacagagatgaagcattaaacaaccggttccagatcaaaggtgttgagctgaagtcaggatacaaagattggatcctatggatttcctttgccatatcatgttttttgctttgtgttgctttgttggggttcatcatgtgggcctgccaaaaaggcaacattaggtgcaacatttgcatttga

SEQ ID NO: 32408 - RNA, 1701 nt, synthetic construct; identical to SEQ ID NO: 32266
  misc_feature 1..1701: note = hemagglutinin__InfluenzaA__ABU92758
  source 1..1701: mol_type = other RNA

SEQ ID NO: 32409 - RNA, 1701 nt, synthetic construct; identical to SEQ ID NO: 32266
  misc_feature 1..1701: note = hemagglutinin__InfluenzaA__ABU92759
  source 1..1701: mol_type = other RNA

SEQ ID NO: 32410 - RNA, 1701 nt, synthetic construct
  misc_feature 1..1701: note = hemagglutinin__InfluenzaA__ABU92760
  source 1..1701: mol_type = other RNA
atgaagactatcattgctttgagctacattctatgtctggttttcgctcaaaaacttcccggaaatgacaacagcacggcaacgctgtgccttgggcaccatgcagtaccaaacggaacgatagtgaaaacaatcacgaatgaccaaattgaagttactaatgctactgagctggttcagatttcctcaacaggtgaaatatgcaacagtccccatcagatccttgatggagaaaactgcacactaatagatgctctattgggagaccctcagtgtgatggcttccaaaataagaaatgggacctttttgttgaacgcagcaaagcctacagcaactgttacccttatgatgtgccggattatgcctcccttaggtcactagttgcctcatccggcacactggagtttaacaatgaaagcttcgattggactggagtcactcagaatggaacaagctctgcttgcaaaaggagatctgataaaagtttctttagtagattgaattggttgacccacttaaaatacaaatacccagcattaaacgtaactatgccaaacaatgaaaaatttgacaaattgtacatttggggggttcaccacccgggtacggacagtgaccaaatcagcctatatgctcaagcatcaggaagaatcacagtctctaccaaaagaagccaacaaactgtaatcccgaatatcggatctagacccagggtaagggatgtctccagccgaataagcatctattggacaatagtaaaaccgggagacatacttttgattaacagcacagggaatctaattgctcctcggggttacttcaaaatacgaagtgggaaaagctcaataatgagatcagatgcacccattggcaaatgcaattctgaatgcatcactccaaatggaagcattcccaatgacaaaccatttcaaaatgtaaacaggatcacatatggggcctgtcccagatatgttaagcaaaacactctgaaattggcaacagggatgcgaaatgtaccagagaaacaaactagaggcatatttggcgcaatcgcgggtttcatagaaaatggttgggagggaatggtggacggttggtacggtttcaggcatcaaaattctgagggcacaggacaagcagcagatctcaaaagcactcaagcagcaatcaaccaaatcaatgggaaactgaataggttaatcgggaaaacaaacgagaaattccatcagattgaaaaagaattctcggaagtagaaggaagaattcaggacctcgagaaatatgttgaggacactaaaatagatctctggtcatacaacgcggagcttcttgttgccctggagaaccaacatacaattgatctaactgactcagaaatgaacaaactgtttgaaagaacaaagaagcaactgagggaaaatgctgaggatatgggcaatggttgtttcaaaatataccacaaatgtgacaatgcctgcatagggtcaatcagaaatggaacttatgaccatgatgtgtacagagatgaagcattaaacaaccggttccagatcaaaggtgttgagctgaagtcaggatacaaagattggatcctatggatttcctttgccatatcatgttttttgctttgtgttgctttgttggggttcatcatgtgggcctgccaaaaaggcaacattaggtgcaacatttgcatttga

SEQ ID NO: 32411 - RNA, 1698 nt, synthetic construct
  misc_feature 1..1698: note = hemagglutinin__InfluenzaA__ABV29579
  source 1..1698: mol_type = other RNA
atgaaagtaaaactactggttctgttatgtacatttacagctacatatgcagacacaatatgtataggctaccatgccaacaactcgaccgacactgttgacacagtacttgagaagaatgtgacagtgacacactctgtcaacctacttgaggacagtcacaatggaaaactatgtctactaaaaggaatagccccactacaattgggtaattgcagcgttgccggatggatcttaggaaacccagaatgcgaattactgatttccaaggaatcatggtcctacattgtagagacaccaaatcctgagaatggaacatgttacccagggtatttcgccgactatgaggagctgagagagcaattgagttcagtatcttcatttgagaggttcgaaatattccccaaagagagctcatggcccaaccacaccgtaaccggagtatcagcatcatgctcccataacgggaaaagcagtttttacagaaatttgctatggctgacggggaagaatggtttgtatccaaacctgagcaagtcctatgcaaacaacaaagagaaagaagtccttgtactgtggggtgttcatcacccgcctaacataggggaccaaagggccctctatcatacagaaaatgcttatgtctctgtagtgtcttcacattatagcagaagattcaccccagaaatagccaaaagacccaaggtgagagatcaggaaggaagaatcaactactactggactctgcttgaacccggggatacaataatatttgaggcaaatggaaatctaatagcgccaaggtttgctttcgcactgagtagaggctttggatcaggaatcatcacctcaaatgcaccaatggatgaatgtgatgcgaaatgtcaaacgcctcagggagctataaacagcagtcttcctttccagaatgtacacccagtcacaataggagagtgtccaaagtatgtcaggagtacaaaattaagaatggttacaggactaaggaacatcccatccattcaatccagaggtttgtttggagccattgccggtttcattgaaggggggtggactggaatggtagatggttggtatggttatcaccatcagaatgagcaaggatctgggtatgctgcagatcaaaaaagcacacaaaatgccattaacgggattacaaacaaggtgaattctgtaattgagaaaatgaacactcaattcacagctgtgggcaaagaattcaacaaattggaaaaaaggatggaaaacttaaataaaaaagttgatgatgggtttctagacatttggacatataacgcagaattgttggttctactggaaaatgaaaggactttggacttccatgactccaacgtgaagaatctgtatgagaaagtaaaaagccaattaaagaataatgccaaagaaataggaaacgggtgttttgaattctatcacaagtgtaacgatgaatgcatggagagtgtgaaaaatggaacttatgactatccaaaatattccgaagaatcaaagttgaacagggagaaaattgatggagtgaaattggaatcaatgggagtctatcagattttggcgatctactcaacagtcgccagttccctggttcttttggtctccctgggggcaatcagcttctggatgtgttccaatgggtctttgcagtgtagaatatgcatctaa

SEQ ID NO: 32412 - RNA, 1698 nt, synthetic construct
  misc_feature 1..1698: note = hemagglutinin__InfluenzaA__ABV29612
  source 1..1698: mol_type = other RNA
atgaaagtaaaactactgattctgttatgtacatttacagctacatatgcagacacaatatgtataggctaccatgccaacaactcgaccgacactgttgacacagtacttgagaagaatgtgacagtgacacactctgtcaacctacttgaggacagtcacaatggaaaactatgtctactaaaaggaatagccccactacaattgggtaattgcagcgttgccggatggatcttaggaaacccagaatgcgaattactgatttccaaggaatcatggtcctacattgtagagacaccaaatcctgagaatggaacatgttacccagggtatttcgccgactatgaggagctgagagagcaattgagttcagtatcttcatttgagaggttcgaaatattccccaaagagagctcatggcccaaccacaccgtaaccggagtatcagcatcatgctcccataacgggaaaagcagtttttacagaaatttgctatggctgacggggaagaatggtttgtatccaaacctgagcaagtcctatgcaaacaacaaagagaaagaagtccttgtactgtggggtgttcatcacccgcctaacataggggaccaaagggccctctatcatacagaaaatgcttatgtctctgtagtgtcttcacattatagcagaagattcaccccagaagtagccaaaagacccaaggtgagagatcaggaaggaagaatcaactactactggactctgcttgaacccggggatacaataatatttgaggcaaatggaaatctaatagcgccaaggtttgctttcgcactgagtagaggctttggatcaggaatcatcacctcaaatgcaccaatggatgaatgtgatgcgaaatgtcaaacacctcagggagctataaacagcagtcttcctttccagaatgtacacccagtcacaataggagagtgtccaaagtatgtcaggagtacaaaattaagaatggttacaggactaaggaacatcccatccattcaatccagaggtttatttggagcaattgccggtttcattgaaggggggtggactggaatggtagatggttggtatggttatcaccatcagaatgagcaaggatctgggtatgctgcagatcaaaaaagcacacaaaatgccattaacgggattacaaacaaggtgaattctgtaattgagaaaatgaacactcaattcacagctgtgggcaaagaattcaacaaattggaaagaaggatggaaaacttaaataaaaaagttgatgatgggtttctagacatttggacatataacgcagaattgttggttctactggaaaatgaaaggactttggacttccatgactccaacgtgaagaatctgtatgagaaagtaaaaagccaattaaagaataatgccaaagaaataggaaacgggtgttttgaattctatcacaagtgtaacgatgaatgcatggagagtgtgaaaaatggaacttatgactatccaaaatattccgaagaatcaaagttgaacagggagaaaattgatggagtgaaattggaatcaatgggggtctatcagattttggcgatctactcaacagtcgccagttccctggttcttttggtctccctgggggcaatcagcttctggatgtgttccaatgggtctttgcagtgtagaatatgcatctaa

SEQ ID NO: 32413 - RNA, 1698 nt, synthetic construct
  misc_feature 1..1698: note = hemagglutinin__InfluenzaA__ABV29634
  source 1..1698: mol_type = other RNA
atgaaagtaaaactacttgttctgttatgtacatttacagctacatatgcagacacaatatgtataggctaccatgccaacaactcgaccgacactgttgacacagtacttgagaagaatgtgacagtgacacactctgtcaacctacttgaggacagtcacaatggaaaactatgtctactaaaaggaatagccccactacaattgggtaattgcagcgttgccggatggatcttaggaaacccagaatgcgaattactgatttccaaggaatcatggtcctacattgtagaagcaccaagtcctgagaatggaacatgttacccaggatattttgccgactatgaggagctgagggagcaattgagttcagtatcttcatttgagaggttcgaaatattccccaaagagagctcatggcccaaccacacagtaaccggagtatcagcatcatgctcccataacgggaaaagcagtttttacagaaatttgctatggctgacggggaagaatggtttgtatccaaacctgagcaagtcctatgcaaacaacaaagagaaagaagtccttgtactgtggggtgttcatcacccgcctaacataggggaccaaagggccctctatcatacagaaaatgcttatgtctctgtagtgtcttcacattatagcagaagattcaccccagaaatagccaaaagacccaaggtgagagatcaggaaggaagaatcaactactactggactctgctggaacccggggatacaataatatttgaggcaaatggaaatctaatagcgccaaggtttgctttcgcactgagtagaggctttggatcaggaatcatcacctcaaatgcaccaatgggtgaatgtgatgcgaagtgtcaaacacctcagggagctataaacagtagtcttcctttccagaatgtacacccagtcacaataggagagtgtccaaagtatgtcaggagtgcaaaattaagaatggttacaggactaaggaacatcccatccattcaatccagaggtttgtttggagccattgccggtttcattgaaggggggtggactggaatggtagatggttggtatggttatcaccatcagaatgagcaaggatctgggtatgctgcagatcaaaaaagcacacaaaatgccattaacgggattacaaacaaggtgaattctgtaattgagaaaatgaacactcaattcacagctgtgggcaaagaattcaacaaattggaaagaaggatggaaaacttaaataaaaaggttgatgatgggtttctagacatttggacatataacgcagaattgttggttctactggaaaatgaaaggactttggacttccatgactccaacgtgaagaatctgtatgagaaagtaaaaagccaattaaagaataatgccaaagaaataggaaacgggtgttttgaattctatcacaagtgtaacgatgaatgcatggagagtgtgaaaaatggaacttatgactatccaaaatattccgaagaatcaaagttgaacagggagaaaattgatggagtgaaattggaatcaatgggagtctatcagattctggcgatctactcaacagtcgccagttccctggttcttttggtctccctgggggcaatcagcttctggatgtgttccaatgggtctttgcagtgtagaatatgcatctaa

SEQ ID NO: 32414 - RNA, 1698 nt, synthetic construct
  misc_feature 1..1698: note = hemagglutinin__InfluenzaA__ABV29645
  source 1..1698: mol_type = other RNA
atgaaagtaaaactactgattctgttatgtacatttacagctacatatgcagacacaatatgtataggctaccatgccaacaactcgaccgacactgttgacacagtacttgagaagaatgtgacagtgacacactctgtcaacctacttgaggacagtcacaatggaaaactatgtctactaaaaggaatagccccactacaattgggtaattgcagcgttgccggatggatcttaggaaacccagaatgcgaattactgatttccaaggaatcatggtcctacattgtagagacaccaaatcctgagaatggaacatgttacccagggtatttcgccgactatgaggagctgagagagcaattgagttcagtatcttcatttgagaggttcgaaatattccccaaagagagctcatggcccaaccacaccgtaaccggagtatcagcatcatgctcccataacgggaaaagcagtttttacagaaatttgctatggctgacggggaagaatggtttgtatccaaacctgagcaagtcctatgcaaacaacaaagaaaaagaagtccttgtactgtggggtgttcatcacccgcctaacataggggaccaaagggccctctatcatacagaaaatgcttatgtctctgtagtgtcttcacattatagcagaagattcaccccagaaatagccaaaagacccaaggtgagagatcaggaaggaagaatcaactactactggactctgcttgaacccggggatacaataatatttgaggcaaatggaaatctaatagcgccaaggtttgctttcgcactgagtagaggctttggatcaggaatcatcacctcaaatgcaccaatggatgaatgtgatgcgaaatgtcaaacacctcagggagctataaacagcagtcttcctttccagaacgtacacccagtcacaataggagagtgtccaaagtatgtcaggagtacaaaattaagaatggttacaggactaaggaacatcccatccattcaatccagaggtttatttggagccattgccggtttcattgaaggggggtggactggaatggtagatggttggtatggttatcaccatcagaatgagcaaggatctgggtatgctgcagatcaaaaaagcacacaaaatgccattaacgggattacaaacaaggtgaattctgtaattgagaaaatgaacactcaattcacagctgtgggcaaagaattcaacaaattggaaagaaggatggaaaacttaaataaaaaagttgatgatgggtttctagacatttggacatataacgcagaattgttggttctactggaaaatgaaaggactttggacttccatgactccaacgtgaagaatctgtatgagaaagtaaaaagccaattaaagaataatgccaaagaaataggaaacgggtgttttgaattctatcacaagtgtaacgatgaatgcatggagagtgtgaaaaatggaacttatgactatccaaaatattccgaagaatcaaagttgaacagggagaaaattgatggagtgaaattggaatcaatgggagtctatcagattttggcgatctactcaacagtcgccagttccctggttcttttggtctccctgggggcaatcagcttctggatgtgttccaatgggtctttgcagtgtagaatatgcatctaa

SEQ ID NO: 32415 - RNA, 1698 nt, synthetic construct
  misc_feature 1..1698: note = hemagglutinin__InfluenzaA__ABV29667
  source 1..1698: mol_type = other RNA
atgaaagtaaaactactgattctgttatgtacatttacagctacatatgcagacacaatatgtataggctaccatgccaacaactcgaccgacactgttgacacagtacttgagaagaatgtgacagtgacacactctgtcaacctacttgaggacagtcacaatggaaaactatgtctactaaaaggaatagccccactacaattgggtaattgcagcgttgccggatggatcttaggaaacccagaatgcgaattgctgatttccaaggaatcatggtcctacattgtagagacaccaaatcctgagaatggaacatgttacccagggtatttcgccgactatgaggagctgagagagcaattgagttcagtatcttcatttgagagattcgaaatattccccaaagagagctcatggcccaaccacaccgtaaccggagtatcagcatcatgctcccataacgggaaaagcagtttttacagaaatttgctatggctgacggggaagaatggtttgtatccaaacctgagcaagtcctatgcaaacaacaaagagaaagaagtccttgtactgtggggtgttcatcacccgcctaacataggggaccaaagggccctctatcatacagaaaatgcttatgtctctgtagtgtcttcacattatagcagaagattcaccccagaaatagccaaaagacccaaggtgagagatcaggaaggaagaatcaactactactggactctgcttgaacccggggatacaataatatttgaggcaaatggaaatctaatagcgccaaggtttgctttcgcactgagtagaggctttggatcaggaatcatcacctcaaatgcaccaatggatgaatgtgatgcgaaatgtcaaacacctcagggagctataaacagcagtcttcctttccagaatgtacacccagtcacaataggagagtgtccaaagtatgtcaggagtacaaaattaagaatggttacaggactaaggaacatcccatccattcaatccagaggtttatttggagccattgccggtttcattgaaggggggtggactggaatggtagatggttggtatggttatcaccatcagaatgagcaaggatctgggtatgctgcagatcaaaaaagcacacaaaatgccattaacgggattacaaacaaggtgaattctgtaattgagaaaatgaacactcaattcacagctgtgggcaaagaattcaacaaattggaaagaaggatggaaaacttaaataaaaaagttgatgatgggtttctagacatttggacatataacgcagaattgttggttctactggaaaatgaaaggactttggacttccatgactccaacgtgaagaatctgtatgagaaagtaaaaagccaattaaagaataatgccaaagaaataggaaacgggtgttttgaattctatcacaagtgtaatgatgaatgcatggagagtgtgaaaaatggaacttatgactatccaaaatattccgaagaatcaaagttgaacagggagaaaattgatggagtgaaattggaatcaatgggagtctatcagattttggcgatctactcaacagtcgccagttccctggttcttttggtctccctgggggcaatcagcttctggatgtgttccaatgggtctttgcagtgtagaatatgcatctaa

SEQ ID NO: 32416 - RNA, 1698 nt, synthetic construct
  misc_feature 1..1698: note = hemagglutinin__InfluenzaA__ABV29678
  source 1..1698: mol_type = other RNA
atgaaagtaaaactactgattctgttatgtacatttacagctacatatgcagacacaatatgtataggctaccatgccaacaactcgaccgacactgttgacacagtacttgagaagaatgtgacagtgacacactctgtcaacctacttgaggacagtcacaatggaaaactatgtctactaaaaggaatagccccactacaattgggtaattgcagcgttgccggatggatcttaggaaacccagaatgcgaattactgatttccaaggaatcatggtcctacattgtagagacaccaaatcctgagaatggaacatgttacccagggtatttcgccgactatgaggagctgagagagcaattgagttcagtatcttcatttgagaggttcgaaatattccccaaagagagctcatggcccaaccacaccgtaaccggagtatcagcatcatgctcccataacgggaaaagcagtttttacagaaatttgctatggctgacggggaagaatggtttgtatccaaacctgagcaagtcctatgcaaacaacaaagagaaagaagtccttgtactgtggggtgttcatcacccgcctaacataggggaccaaagggccctctatcatacagaaaatgcttatgtctctgtagtgtcttcacattatagcagaagattcaccccagaaatagccaaaagacccaaggtgagagatcaggaaggaagaatcaactactactggactctgcttgaacccggggatacaataatatttgaggcaaatggaaatctaatagcgccaaggtttgctttcgcactgagtagaggcttcggatcaggaatcatcacctcaaatgcaccagtggatgaatgtgatgcgaaatgtcaaacacctcagggagctataaacagcagtcttcctttccagaatgtacacccagtcacaataggagagtgtccaaagtatgtcaggagtacaaaattaagaatggttacaggactaaggaacatcccatccattcaatccagaggtttatttggagccattgccggtttcattgaaggggggtggactggaatggtagatggttggtatggttatcaccatcagaatgagcaaggatctgggtatgctgcagatcaaaaaagcacacaaaatgccattaacgggattacaaacaaggtgaattctgtaattgagaaaatgaacactcaattcacagctgtgggcaaagaattcaacaaattggaaagaaggatggaaaacttaaataaaaaagttgatgatgggtttctagacatttggacatataacgcagaattgttggttctactggaaaatgaaaggactttggacttccatgactccaacgtgaagaatctgtatgagaaagtaaaaagccaattaaagaataatgccaaagaaataggaaacgggtgttttgaattctatcacaagtgtaacgatgaatgcatggagagtgtgaaaaatggaacttatgactatccaaaatattccgaagaatcaaagttgaacagggagaaaattgatggagtgaaattggaatcaatgggagtctatcagattttggcgatctactcaacagtcgccagttccctggttcttttggtctccctgggggcaatcagcttctggatgtgttccaatgggtctttgcagtgtagaatatgcatctaa

SEQ ID NO: 32417 - RNA, 1698 nt, synthetic construct
  misc_feature 1..1698: note = hemagglutinin__InfluenzaA__ABV29689
  source 1..1698: mol_type = other RNA
atgaaagtaaaactactggttctgttatgtacatttacagctacatatgcagacacaatatgtataggctaccatgccaacaactcgaccgacactgttgacacagtacttgagaagaatgtgacagtgacacactctgtcaacctacttgaggacagtcacaatggaaaactatgtctactaaaaggaatagccccactacaattgggtaattgcagcgttgccggatggatcttaggaaacccagaatgcgaattactgatttccaaggaatcatggtcctacattgtagagacaccaaatcctgagaatggaacatgttacccagggtatttcgccgactatgaggagctgagagagcaattgagttcagtatcttcatttgagaggttcgaaatattccccaaagagagctcatggcccaaccacaccgtaaccggagtatcagcatcatgctcccataacgggaaaagcagtttttacagaaatttgctatggctgacggggaagaatggtttgtatccaaacctgagcaagtcctatgcaaacaacaaagagaaagaagtccttgtactgtggggtgttcatcacccacctaacataggggaccaaagggccctctatcatacagaaaatgcttatgtctctgtagtgtcttcacattatagcagaagattcaccccagaaatagccaaaagacccaaggtgagagatcaggaaggaagaatcaactactactggactctgcttgaacccggggatacaataatatttgaggcaaatggaaatctaatagcgccaaggtttgctttcgcactgagtagaggctttggatcaggaatcatcacctcaaatgcaccaatggatgaatgtgatgcgaaatgtcaaacacctcagggagctataaacagcagtcttcctttccagaatgtacacccagtcacaataggagagtgtccaaagtatgtcaggagtacaaaattaagaatggttacaggactaaggaacatcccatccattcaatccagaggtttgtttggagccattgccggtttcattgaaggggggtggattggaatggtagatggttggtatggttatcaccatcagaatgagcaaggatctgggtatgctgcagatcaaaaaagcacacaaaatgccattaacgggattacaaacaaggtgaattctgtaattgagaaaatgaacactcaattcacagctgtgggcaaagaattcaacaaattggaaagaaggatggaaaacttaaataaaaaagttgatgatgggtttctagacatttggacatataacgcagaattgttggttctactggaaaatgaaaggactttggacttccatgactccaacgtgaagaatctgtatgagaaagtaaaaagccaattaaagaataatgccaaagaaataggaaacgggtgttttgaattctatcacaagtgtaacgatgaatgcatggagagtgtgaaaaatggaacttatgactatccaaaatattccgaagaatcaaagttgaacagggagaaaattgatggagtgaaattggaatcaatgggagtctatcagattttggcgatctactcaacagtcgccagttccctggttcttttggtctccctgggggcaatcagcttctggatgtgttccaatgggtctttgcagtgtagaatatgcatctaa

SEQ ID NO: 32418 - RNA, 1698 nt, synthetic construct
  misc_feature 1..1698: note = hemagglutinin__InfluenzaA__ABV29700
  source 1..1698: mol_type = other RNA
atgaaagtaaaactactggttctgttatgtacatttacagctacatatgcagacacaatatgtataggctaccatgccaacaactcgaccgacactgttgacacagtacttgagaagaatgtgacagtgacacactctgtcaacctacttgaggacagtcacaatggaaaactatgtctactaaaaggaatagccccactacaattgggtaattgcagcgttgccggatggatcttaggaaacccagaatgcgaattactgatttccaaggaatcatggtcctacattgtagagacaccaaatcctgagaatggaacatgttacccagggtatttcgccgactatgaggagctgagagagcaattgagttcagtatcttcatttgagaggttcgaaatattccccaaagagagctcatggcccaaccacaccgtaaccggagtatcagcatcatgctcccataacgggaaaagcagtttttacagaaatttgctatggctgacggggaagaatggtttgtatccaaacctgagcaagtcctatgcaaacaacaaagagaaagaagtccttgtactgtggggtgttcatcacccgcctaacataggggaccaaagggccctctatcatacagaaaatgcttatgtctctgtagtgtcttcacattatagcagaagattcaccccagaaatagccaaaagacccaaggtgagagatcaggaaggaagaatcaactactactggactctgcttgaacccggggatacaataatatttgaggcaaatggaaatctaatagcgccaaggtttgctttcgcactgagtagaggctttggatcaggaatcatcacctcaaatgcaccaatggatgaatgtgatgcgaaatgtcaaacacctcagggagctataaacagcagtcttcctttccagaatgtacacccagtcacaataggagagtgtccaaagtatgtcaggagtacaaaattaagaatggttacaggactaaggaacatcccatccattcaatccagaggtttgtttggagccattgccggtttcattgaaggggggtggactggaatggtagatggatggtatggttaccaccatcagaatgagcaaggatctgggtatgctgctgatcaaaaaagcacacaaaatgccattaacgggattacaaacaaggtgaattctgtaattgagaaaatgaacactcaattcacagctgtgggcaaagaattcaacaaattggaaagaaggatggaaaacttaaataaaaaagttgatgatgggtttctagacatttggacatataacgcagaattgttggttctactggaaaatgaaaggactttggacttccatgactccaacgtgaagaatctgtatgagaaagtaaaaagccaattaaagaataatgccaaagaaataggaaacgggtgttttgaattctatcacaagtgtaacgatgaatgcatggagagtgtgaaaaatggaacttatgactatccaaaatattccgaagaatcaaagttgaacagggagaaaattgatggagtgaaattggaatcaatgggagtctatcagattttggcgatctactcaacagtcgccagttccctggttcttttggtctccctgggggcaatcagcttctggatgtgttccaatgggtctttgcagtgtagaatatgcatctaa

SEQ ID NO: 32419 - RNA, 1701 nt, synthetic construct
  misc_feature 1..1701: note = hemagglutinin__InfluenzaA__ABV29711
  source 1..1701: mol_type = other RNA
atgaagactatcattgctttgagctacattctatgtctggttttcgctcaaaaacttcccggaaatgacaacagcacggcaacgctgtgccttgggcatcatgcagtaccaaacggaacgatagtgaaaacaatcacgaatgaccaaattgaagttactaatgctactgagctagttcagagttcctcaacaggtgaaatatgcgacagtcctcatcagatccttgatggagaaaactgcacactaatagatgctctattgggagaccctcagtgtgatggcttccaaaataagaaatgggacctttttgttgaacgcagcaaagcctacagcaactgttacccttatgatgtgccggattatgcctcccttaggtcactagttgcctcatccggaacactggagtttaacaatgaaagcttcaattggactggagtcactcaaaacggaacaagctctgcttgcataaggagatctaataacagtttctttagtagattgaattggttgacccacttaaaattcaaatacccagcattgaacgtgactatgccaaacaatgaaaaatttgacaaattgtacatttggggggttcaccacccgggtacggacaatgaccaaatcttcctgtatgctcaagcatcaggaagaatcacagtctctaccaaaagaagccaacaaactgtaatcccgaatatcggatctagacccagagtaaggaatatccccagcagaataagcatctattggacaatagtaaaaccgggagacatacttttgattaacagcacagggaatctaattgctcctaggggttacttcaaaatacaaagtgggaaaagctcaataatgagatcagatgcacccattggcaaatgcaattctgaatgcatcactccaaatggaagcattcccaatgacaaaccattccaaaatgtaaacaggatcacatacggggcctgtcccagatatgttaagcaaaacactctgaaattggcaacagggatgcgaaatgtaccagagaaacaaactagaggcatatttggcgcaatcgcgggtttcatagaaaatggttgggagggaatggtggatggttggtacggtttcaggcatcaaaattctgagggaataggacaagcagcagatctcaaaagcactcaagcagcaatcgatcaaatcaatgggaagctgaataggttgatcgggaaaaccaacgagaaattccatcagattgaaaaagaattctcagaagtcgaagggagaattcaggaccttgagaaatatgttgaggacaccaaaatagatctctggtcatacaacgcggagcttcttgttgccctggagaaccaacatacaattgatctaactgactcagaaatgaacaaactgtttgaaaaaacaaagaagcaactgagggaaaatgctgaggatatgggcaatggttgtttcaaaatataccacaaatgtgacaatgcatgcataggatcaatcagaaatggaacttatgaccacgatgtatacagagatgaagcattaaacaaccggttccagatcaagggcgttgagctgaagtcaggatacaaagattggatcctatggatttcctttgccatatcatgttttttgctttgtgttgctttgttggggttcatcatgtgggcctgccaaaaaggcaacattaggtgcaacatttgcatttga

SEQ ID NO: 32420 - RNA, 1701 nt, synthetic construct
  misc_feature 1..1701: note = hemagglutinin__InfluenzaA__ABV29722
  source 1..1701: mol_type = other RNA
atgaagactatcattgctttgagctacattctatgtctggttttcgctcaaaaacttcctggaaatgacaacagcacggcaacgctgtgccttgggcaccatgcagtaccaaacggaacgatagtgaaaacaatcacgaatgaccaaattgaagttactaatgctactgagctggttcagagttcctcaacaggtgaaatatgcgacagtcctcatcagatccttgatggagaaaactgcacactaatagatgctctattgggagaccctcagtgtgatggcttccaaaataagaaatgggacctttttgttgaacgcagcaaagcctacagcaactgttacccttatgatgtgccggattatgcctcccttaggtcactagttgcctcatccggcacactggagtttaacaatgaaagcttcaattggactggagtcactcaaaacggaacaagctctgcttgcataaggagatctaataacagtttctttagtagattgaattggttgacccacttaaaattcaaatacccagcattgaacgtgactatgccaaacaatgaaaaatttgacaaattgtacatttggggggttcaccacccgggtacggacaatgaccaaatcttcctgtatgctcaagcatcaggaagaatcacagtctctaccaaaagaagccaacaaactgtaatcccgaatatcggatctagacccagagtaaggaatatccccagcagaataagcatctattggacaatagtaaaaccgggagacatacttttgattaacagcacagggaatctaattgctcctaggggttacttcaaaatacgaagtgggaaaagctcaataatgagatcagatgcacccattggcaaatgcaattctgaatgcatcactccaaatggaagcattcccaatgacaaaccattccaaaatgtaaacaggatcacatacggggcctgtcccagatatgttaagcaaaacactctgaaattggcaacagggatgcgaaatgtaccagagaaacaaactagaggcatatttggcgcaatcgcgggtttcatagaaaatggttgggagggaatggtggatggttggtacggtttcaggcatcaaaattctgagggaataggacaagcagcagatctcaaaagcactcaagcagcaatcgatcaaatcaatgggaagctgaataggttgatcgggaaaaccaacgagaaattccatcagattgaaaaagaattcttagaagtcgaagggaggattcaggaccttgagaaatatgttgaggacaccaaaatagatctctggtcatacaacgcggagcttcttgttgccctggagaaccaacatacaattgatctaactgactcagaaatgaacaaactgtttgaaaaaacaaagaagcaactgagggaaaatgctgaggatatgggcaatggttgtttcaaaatataccacaaatgtgacaatgcctgcataggatcaatcagaaatggaacttatgaccacgatgtatacagagatgaagcattaaacaaccggttccagatcaagggcgttgagctgaagtcaggatacaaagattggatcctatggatttcctttgccatatcatgttttttgctttgtgttgctttgttggggttcatcatgtgggcctgccaaaaaggcaacattaggtgcaacatttgcatttga

SEQ ID NO: 32421 - RNA, 1698 nt, synthetic construct
  misc_feature 1..1698: note = hemagglutinin__InfluenzaA__ABV29733
  source 1..1698: mol_type = other RNA
atgaaagtaaaactacttgttctgttatgtacatttacagctacatatgcagacacaatatgtataggctaccatgccaacaactcgactgacactgttgacacagtacttgagaagaatgtgacagtgacacactctgtcaacctacttgaggacagtcacaatggaaaactatgtctactaaaaggaatagccccactacaattgggtaattgcagcgttgccggatggatcttaggaaacccagaatgcgaattactgatttccaaggaatcatggtcctacattgtagaaacaccaaatcctgagaatggaacatgttacccaggatatttcgccgactatgaggagctgagggagcaattgagttcagtatcttcatttgagaggttcgaaatattccccaaagagagctcatggcccaaccacaccgtaaccggagtatcagcatcatgctcccataacggggaaagcagtttttacagaaatttgttatggctgacggggaagaatggtttgtatccaaacctgagcaagtcctatgcaaacaacaaagagaaagaagtccttgtactgtggggtgttcatcacccgcctaacataggagaccaaagggccctctatcatacagaaaatgcttatgtctctgtagtgtcttcacattatagcagaagattcaccccagaaatagccaaaagacccaaggtgagagatcaggaaggaagaatcaactactactggactctgctggaacccggggatacaataatatttgaggcaaatggaaatctaatagcgccaaggtttgctttcgcactgagtagaggctttggatcaggaatcatcacctcaaatgcaccaatggataaatgtgatgcgaagtgtcaaacacctcagggagctataaacagcagtcttcctttccagaatgtacacccagtcacaataggagagtgtccaaagtatgtcaggagtacaaaattaagaatggttacaggactaaggaacatcccatccattcaatccagaggtttgtttggagccattgccggtttcattgaaggggggtggactggaatggtagatggttggtatggttatcaccatcagaatgagcaaggatctgggtatgctgcagatcaaaaaagcacacaaaatgccattaacgggattacaaacaaggtgaattctgtaattgagaaaatgaacactcaattcacagctgtgggcaaagaattcaacaaattggaaagaaggatggaaaatttaaataaaaaggttgatgatgggtttctagacatttggacatataatgcagaattgttggttctactggaaaatgaaaggactttggacttccatgactccaacgtgaagaatctgtatgagaaagtaaaaagccaattaaagaataatgccaaagaaataggaaacgggtgttttgaattctatcacaagtgtgacgatgaatgcatggagagtgtgaaaaatggaacttatgactatccaaaatattccgaagaatcaaagttgaacagggagaaaattgatggagtgaaattggaatcaatgggagtctatcagattctggcgatctactcaacagtcgccagttccttggttcttttggtctccctgggggcaatcagcttctggatgtgttccaatgggtctttgcagtgtagaatatgcatctaa

SEQ ID NO: 32422 - RNA, 1698 nt, synthetic construct
  misc_feature 1..1698: note = hemagglutinin__InfluenzaA__ABV29744
  source 1..1698: mol_type = other RNA
atgaaagtaaaactactgattctgttatgtacatttacagctacatatgcagacacaatatgtataggctaccatgccaacaactcgaccgacactgttgacacagtacttgagaagaatgtgacagtgacacactctgtcaacctacttgaggacagtcacaatggaaaactatgtctactaaaaggaatagccccactacaattgggtaattgcagcgttgccggatggatcttaggaaacccagaatgcgaattactgatttccaaggaatcatggtcctacattgtagagacaccaaatcctgagaatggaacatgttacccagggtatttcgccgactatgaggagctgagagagcaattgagttcagtatcttcatttgagaggttcgaaatattccccaaagagagctcatggcccaaccacaccgtaaccggagtatcagcatcatgctcccataacgggaaaagcagtttttacagaaatttgctatggctgacggggaagaatggtttgtatccaaacctgagcaagtcctatgcaaacaacaaagagaaagaagtccttgtactgtggggtgttcatcacccgcctaacataggggaccaaagggccctctatcatacagaaaatgcttatgtctctgtagtgtcttcacattatagcagaagattcaccccagaaatagccaaaagacccaaggtgagagatcaggaaggaagaatcaactactactggactctgcttgaacccggggatacaataatatttgaggcaaatggaaatctaatagcgccaaggtttgctttcgcactgagtagaggctttggatcaggaatcatcacctcaaatgcaccaatggatgaatgtgatgcgaaatgtcaaacacctcagggagctataaacagcagtcttcctttccagaatgtacacccagtcacaataggagagtgtccaaagtatgtcaggagtacaaaattaagaatggttacaggactaaggaacatcccatccattcaatccagaggtttatttggagccattgccggtttcattgaaggggggtggactggaatggtagatggttggtatggttatcaccatcagaatgagcaaggatctgggtatgctgcagatcaaaaaagcacacaaaatgccattaacgggattacaaacaaggtgaattctgtaattgagaaaatgaacactcaattcacagctgtgggcaaagaattcaacaaattggaaagaaggatggaaaacttaaataaaaaagttgatgatgggtttctagacatttggacatataacgcagaattgttggttctactggaaaatgaaaggactttggacttccatgactccaacgtgaagaatctgtatgagaaagtaaaaagccaattaaagaataatgccaaagaaataggaaacgggtgttttgaattctatcacaagtgtaacgatgaatgcatggagagtgtgaaaaatggaacttatgactatccaaaatattccgaagaatcaaagttgaacagggagaaaattgatggagtgaaattggaatcaatgggggtctatcagattttggcgatctactcaacagtcgccagttccctggttcttttggtctccctgggggcaatcagcttctggatgtgttccaatgggtctttgcagtgtagaatatgcatctaa

SEQ ID NO: 32423 - RNA, 1698 nt, synthetic construct
  misc_feature 1..1698: note = hemagglutinin__InfluenzaA__ABV29755
  source 1..1698: mol_type = other RNA
atgaaagtaaaactacttgttctgttatgtacatttacagctacatatgcagacacaatatgtataggctaccatgccaacaactcgaccgacactgttgacacagtacttgagaagaatgtgacagtgacacactctgtcaacctacttgaggacagtcacaatggaaaactatgtctactaaaaggaatagccccactacaattgggtaattgcagcgttgccggatggatcttaggaaacccagaatgcgaattactgatttccaaggaatcatggtcctacattgtagaaacaccaagtcctgagaatggaacatgttacccaggatatttcgccgactatgaggagctgagggagcaattgagttcagtatcttcatttgagaggttcgaaatattccccaaagagagctcatggcccaaccacacagtaaccggagtatcagcatcatgctcccataacgggaaaagcagtttttacagaaatttgctatggctgacggggaagaatggtttgtatccaaacctgagcaagtcctatgcaaacaacaaagagaaagaagtccttgtactgtggggtgttcatcacccgcctaacataggggaccaaagggccctctatcatacagaaaatgcttatgtctctgtagtgtcttcacattatagcagaagattcaccccagaaatagccaaaagacccaaggtgagagatcaggaaggaagaatcaactactactggactctgctggaacccggggatacaataatatttgaggcaaatggaaatctaatagcgccaaggtttgctttcgcactgagtagaggctttggatcaggaatcatcacctcaaatgcaccaatgggtaaatgtgatgcgaagtgtcaaacacctcagggagctataaacagtagtcttcctttccagaatgtacacccagtcacaataggagagtgtccaaagtatgtcaggagtgcaaaattaagaatggttacaggactaaggaacatcccatccattcaatccagaggtttgtttggagccattgccggtttcattgaaggggggtggactggaatggtagatggttggtatggttatcaccatcagaatgagcaaggatctgggtatgctgcagatcaaaaaagcacacaaaatgccattaacgggattacaaacaaggtgaattctgtaattgagaaaatgaacactcaattcacagctgtgggcaaagaattcaacaaattggaaagaaggatggaaaacttaaataaaaaggttgatgatgggtttctagacatttggacatataacgcagaattgttggttctactggaaaatgaaaggactttggacttccatgactccaacgtgaagaatctgtatgagaaagtaaaaagccaattaaagaataatgccaaagaaataggaaacgggtgttttgaattctatcacaagtgtaacgatgaatgcatggagagtgtgaaaaatggaacttatgactatccaaaatattccgaagaatcaaagttgaacagggagaaaattgatggagtgaaattggaatcaatgggagtctatcagattctggcgatttactcaacagtcgccagttccctggttcttttggtctccctgggggcaatcagcttctggatgtgttccaatgggtctttgcagtgtagaatatgcatctaa

SEQ ID NO: 32424 - RNA, 1698 nt, synthetic construct
  misc_feature 1..1698: note = hemagglutinin__InfluenzaA__ABV29766
  source 1..1698: mol_type = other RNA
atgaaagtaaaactactgattctgttatgtacatttacagctacatatgcagacacaatatgtataggctaccatgccaacaactcgaccgacactgttgacacagtacttgagaagaatgtgacagtgacacactctgtcaacctacttgaggacagtcacaatggaaaactatgtctactaaaaggaatagccccactacaattgggtaattgcagcgttgccggatggatcttaggaaacccagaatgcgaattactgatttccaaggaatcatggtcctacattgtagagacaccaaatcctgagaatggaacatgttacccagggtatttcgccgactatgaggagctgagagagcaattgagttcagtatcttcatttgagaggttcgaaatattccccaaagagagctcatggcccaaccacaccgtaaccggagtatcagcatcatgctcccataacgggaaaagcagtttttacagaaatttgctatggctgacggggaagaatggtttgtatccaaacctgagcaagtcctatgcaaacaacaaagagaaagaagtccttgtactgtggggtgttcatcacccgcctaacataggggaccaaagggccctctatcatacagaaaatgcttatgtctctgtagtgtcttcacattatagcagaagattcaccccagaaatagccaaaagacccaaggtgagagatcaggaaggaagaatcaactactactggactctgcttgaacccggggatacaataatatttgaggcaaatggaaatctaatagcgccaaggtttgctttcgcactgagtagaggctttggatcaggaatcatcacctcaaatgcaccaatggatgaatgtgatgcgaaatgtcaaacacctcagggagctataaacagcagtcttcctttccagaatgtacacccagtcacaataggagagtgtccaaagtatgtcaggagtacaaaattaagaatggttacaggactaaggaacatcccatccattcaatccagaggtttatttggagccattgccggtttcattgaaggggggtggactggaatggtagatggttggtatggttatcaccatcagaatgagcaaggatctgggtatgctgcagatcaaaaaagcacacaaaatgccattaacgggattacaaacaaggtgaattctgtaattgagaaaatgaacactcaattcacagctgtgggcaaagaattcaacaaattggaaagaaggatggaaaacttaaataaaaaagttgatgatgggtttctagacatttggacatataacgcagaattgttggttctactggaaaatgaaaggactttggacttccatgactccaacgtgaagaatctgtatgagaaagtaaaaagccaattaaagaataatgccaaagaaataggaaacgggtgttttgaattctatcacaagtgtaacgatgaatgcatggagagtgtgaaaaatggaacttatgactatccaaaatattccgaagaatcaaagttgaacagggagaaaattgatggagtgaaattggaatcaatgggagtctatcagattttggcgatctactcaacagtcgccagttccctggttcttttggtctccctgggggcaatcagcttctggatgtgttccaatgggtctttgcagtgtagaatatgcatctaa

SEQ ID NO: 32425 - RNA, 1698 nt, synthetic construct
  misc_feature 1..1698: note = hemagglutinin__InfluenzaA__ABV29777
  source 1..1698: mol_type = other RNA
atgaaagtaaaactacttgttctgttatgtacatttacagctacatatgcagacacaatatgtataggctaccatgccaacaactcgactgacactgttgacacagtacttgagaagaatgtgacagtgacacactctgtcaacctacttgaggacagtcacaatggaaaactatgtctactaaaaggaatagccccactacaattgggtaattgcagcgttgccggatggatcttaggaaacccagaatgcgaattactgatttccaaggaatcatggtcctacattgtagaaacaccaaatcctgagaatggaacatgttacccaggatatttcgccgactatgaggagctgagggagcaattgagttcagtatcttcatttgagaggttcgaaatattccccaaagagagctcatggcccaaccacaccgtaaccggagtatcagcatcatgctcccataacggggaaagcagtttttacagaaatttgttatggctgacggggaagaatggtttgtatccaaacctgagcaagtcctatgcaaacaacaaagagaaagaagtccttgtactgtggggtgttcatcacccgcctaacataggagaccaaagggccctctatcatacagaaaatgcttatgtctctgtagtgtcttcacattatagcagaagattcaccccagaaatagccaaaagacccaaggtgagagatcaggaaggaagaatcaactactactggactctgctggaacccggggatacaataatatttgaggcaaatggaaatctaatagcgccaaggtttgctttcgcactgagtagaggctttggatcaggaatcatcacctcaaatgcaccaatggataaatgtgatgcgaagtgtcaaacacctcagggagctataaacagcagtcttcctttccagaatgtacacccagtcacaataggagagtgtccaaagtatgtcaggagtacaaaattaagaatggttacaggactaaggaacatcccatccattcaatccagaggtttgtttggagccattgccggtttcattgaaggggggtggactggaatggtagatggttggtatggttatcaccatcagaatgagcaaggatctgggtatgctgcagatcaaaaaagcacacaaaatgccattaacgggattacaaacaaggtgaattctgtaattgagaaaatgaacactcaattcacagctgtgggcaaagaattcaacaaattggaaagaaggatggaaaatttaaataaaaaggttgatgatgggtttctagacatttggacatataacgcagaattgttggttctactggaaaatgaaaggactttggacttccatgactccaacgtgaagaatctgtatgagaaagtaaaaagccaattaaagaataatgccaaagaaataggaaacgggtgttttgaattctatcacaagtgtaacgatgaatgcatggagagtgtgaaaaatggaacttatgactatccaaaatattccgaagaatcaaagttgaacagggagaaaattgatggagtgaaattggaatcaatgggagtctatcagattctggcgatctactcaacagtcgccagttccttggttcttttggtctccctgggggcaatcagcttctggatgtgttccaatgggtctttgcagtgtagaatatgcatctaa

SEQ ID NO: 32426 - RNA, 1698 nt, synthetic construct
  misc_feature 1..1698: note = hemagglutinin__InfluenzaA__ABV29788
  source 1..1698: mol_type = other RNA
atgaaagtaaaactactgattctgttatgtacatttacagctacatatgcagacacaatatgtataggctaccatgccaacaactcgaccgacactgttgacacagtacttgagaagaatgtgacagtgacacactctgtcaacctacttgaggacagtcacaatggaaaactatgtctactaaaaggaatagccccactacaattgggtaattgcagcgttgccggatggatcttaggaaacccagaatgcgaattactgatttccaaggaatcatggtcctacattgtagagacaccaaatcctgagaatggaacatgttacccagggtatttcgccgactatgaggagctgagagagcaattgagttcagtatcttcatttgagaggttcgaaatattccccaaagagagctcatggcccaaccacaccgtaaccggagtatcagcatcatgctcccataacgggaaaagcagtttttacagaaatttgctatggctgacggggaagaatggtttgtatccaaacctgagcaagtcctatgcaaacaacaaagagaaagaagtccttgtactgtggggtgttcatcacccgcctaacataggggaccaaagggccctctatcatacagaaaatgcttatgtctctgtagtgtcttcacattatagcagaagattcaccccagaaatagccaaaagacccaaggtgagagatcaggaaggaagaatcaactactactggactctgcttgaacccggggatacaataatatttgaggcaaatggaaatctaatagcgccaaggtttgctttcgcactgagtagaggctttggatcaggaatcatcacctcaaatgcaccaatggatgaatgtgatgcgaaatgtcaaacacctcagggagctataaacagcagtcttcctttccagaacgtacacccagtcacaataggagagtgtccaaagtatgtcaggagtacaaaattaagaatggttacaggactaaggaacatcccatccattcaatccagaggtttatttggagccattgccggtttcattgaaggggggtggactggaatggtagatggttggtatggttatcaccatcagaatgagcaaggatctgggtatgctgcagatcaaaaaagcacacaaaatgccattaacgggattacaaacaaggtgaattctgtaattgagaaaatgaacactcaattcacagctgtgggcaaagaattcaacaaattggaaagaaggatggaaaacttaaataaaaaagttgatgatgggtttctagacatttggacatataacgcagaattgttggttctactggaaaatgaaaggactttggacttccatgactccaacgtgaagaatctgtatgagaaagtaaaaagccaattaaagaataatgccaaagaaataggaaacgggtgttttgaattctatcacaagtgtaacgatgaatgcatggagagtgtgaaaaatggaacttatgactatccaaaatattccgaagaatcaaagttgaacagggagaaaattgatggagtgaaattggaatcaatgggagtctatcagattttggcgatctactcaacagtcgccagttccctggttcttttggtctccctgggggcaatcagcttctggatgtgttccaatgggtctttgcagtgtagaatatgcatctaa

SEQ ID NO: 32427 - RNA, 1698 nt, synthetic construct
  misc_feature 1..1698: note = hemagglutinin__InfluenzaA__ABV29799
  source 1..1698: mol_type = other RNA
atgaaagtaaaactactggttctgttatgtacatttacagctacatatgcagacacaatatgtataggctaccatgccaacaactcgaccgacactgttgacacagtacttgagaagaatgtgacagtgacacactctgtcaacctacttgaggacagtcacaatggaaaactatgtctactaaaaggaatagccccactacaattgggtaattgcagcgttgccggatggatcttaggaaacccagaatgcgaattactgatttccaaggaatcatggtcctacattgtagagacaccaaatcctgagaatggaacatgttacccagggtatttcgccgactatgaggagctgagagagcaattgagttcagtatcttcatttgagaggttcgaaatattccccaaagagagctcatggcccaaccacaccgtaaccggagtatcagcatcatgctcccataacgggaaaagcagtttttacagaaatttgctatggctgacggggaagaatggtttgtatccaaacctgagcaagtcctatgcaaacaacaaagagaaagaagtccttgtactgtggggtgttcatcacccgcctaacataggggaccaaagggccctctatcatacagaaaatgcttatgtctctgtagtgtcttcacattatagcagaagattcaccccagaaatagccaaaagacccaaggtgagagatcaggaaggaagaatcaactactactggactctgcttgaacccggggatacaataatatttgaggcaaatggaaatctaatagcgccaaggtttgctttcgcactgagtagaggctttggatcaggaatcatcacctcaaatgcaccaatggatgaatgtgatgcgaaatgtcaaacacctcagggagctataaacagcagtctccctttccagaatgtacacccagtcacaataggagagtgtccaaagtatgtcaggagtacaaaattaagaatggttacaggactaaggaacatcccatccattcaatccagagggttgtttggagccattgccggtttcattgaaggggggtggactggaatggtagatggatggtatggttaccaccatcagaatgagcaaggatctgggtatgctgctgatcaaaaaagcacacaaaatgccattaacgggattacaaacaaggtgaattctgtaattgagaaaatgaacactcaattcacagctgtgggcaaagaattcaacaaattggaaagaaggatggaaaacttaaataaaaaagttgatgatgggtttctagacatttggacatataacgcagaattgttggttctactggaaaatgaaaggactttggacttccatgactccaacgtgaagaatctgtatgagaaagtaaaaagccaattaaagaataatgccaaagaaataggaaacgggtgttttgaattctatcacaagtgtaacgatgaatgcatggagagtgtgaaaaatggaacttatgactatccaaaatattccgaagaatcaaagttgaacagggagaaaattgatggagtgaaattggaatcaatgggagtctatcagattttggcgatctactcaacagtcgccagttccctggttcttttggtctccctgggggcaatcagcttctggatgtgttccaatgggtctttgcagtgtagaatatgcatctaa

SEQ ID NO: 32428 - RNA, 1701 nt, synthetic construct
  misc_feature 1..1701: note = hemagglutinin__InfluenzaA__ABV29821
  source 1..1701: mol_type = other RNA
atgaagactatcattgctttgagctacattctatgtctggttttcgctcaaaaacttcctggaaatgacaacagcacggcaacgctgtgccttgggcaccatgcagtaccaaacggaacgatagtgaaaacaatcacgaatgaccaaattgaagttactaatgctactgagctggttcagagttcctcaacaggtgaaatatgcgacagtcctcatcagatccttgatggagaaaactgcacactaatagatgctctattgggagaccctcagtgtgatggcttccaaaataagaaatgggacctttttgttgaacgcagcaaagcctacagcaactgttacccttatgatgtgccggattatgcctcccttaggtcactagttgcctcatccggcacactggagtttaacaatgaaagcttcaattggactggagtcactcaaaacggaacaagctctgcttgcataaggagatctaataacagtttctttagtagattgaattggttgacccacttaaaattcaaatacccagcattgaacgtgactatgccaaacaatgaaaaatttgacaaattgtacatttggggggttcaccacccgggtacggacaatgaccaagtcttcctgtatgctcaagcatcaggaagaatcacagtctctaccaaaagaagccaacaaactgtaatcccgaatatcggatctagacccagagtaaggaatatccccagcagaataagcatctattggacaatagtaaaaccgggagacatacttttgattaacagcacagggaatctaattgctcctaggggttacttcaaaatacgaagtgggaaaagctcaataatgagatcagatgcacccattggcaaatgcaattctgaatgcatcactccaaatggaagcattcccaatgacaaaccattccaaaatgtaaacaggatcacatacggggcctgtcccagatatgttaagcaaaacactctgaaattggcaacagggatgcgaaatgtaccagagaaacaaactagaggcatatttggcgcaatcgcgggtttcatagaaaatggttgggagggaatggtggatggttggtacggtttcaggcatcaaaattctgagggaataggacaagcagcagatctcaaaagcactcaagcagcaatagatcaaatcaatgggaagctgaataggttgatcgggaaaaccaacgagaaattccatcagattgaaaaagaattctcagaagtcgaagggagaattcaggaccttgagaaatatgttgaggacaccaaaatagatctctggtcatacaacgcggagcttcttgttgccctggagaaccaacatacaattgatctaactgactcagaaatgaacaaactgtttgaaaaaacaaagaagcaactgagggaaaatgctgaggatatgggcaatggttgtttcaaaatataccacaaatgtgacaatgcctgcataggatcaatcagaaatggaacttatgaccacgatgtatacagagatgaagcattaaacaaccggttccagatcaagggcgttgagctgaagtcaggatacaaagattggatcctatggatttcctttgccatatcatgttttttgctttgtgttgctttgttggggttcatcatgtgggcctgccaaaaaggcaacattaagtgcaacatttgcatttga

SEQ ID NO: 32429 - RNA, 1698 nt, synthetic construct
  misc_feature 1..1698: note = hemagglutinin__InfluenzaA__ABV29832
  source 1..1698: mol_type = other RNA
atgaaagtaaaactactggttctgttatgtacatttacagctacatatgcagacacaatatgtataggctaccatgccaacaactcgaccgacactgttgacacagtacttgagaagaatgtgacagtgacacactctgtcaacctacttgaggacagtcacaatggaaaactatgtctactaaaaggaatagccccactacaattgggtaattgcagcgttgccggatggatcttaggaaacccagaatgcgaattactgatttccaaggaatcatggtcctacattgtagagacaccaaatcctgagaatggaacatgttacccagggtatttcgccgactatgaggagctgagagagcaattgagttcagtatcttcatttgagaggttcgaaatattccccaaagagagctcatggcccaaccacaccgtaaccggagtatcagcatcatgctcccataacgggaaaagcagtttttacagaaatttgctatggctgacggggaagaatggtttgtatccaaacctgagcaagtcctatgcaaacaacaaagagaaagaagtccttgtactgtggggtgttcatcacccgcctaacataggggaccaaagggccctctatcatacagaaaatgcttatgtctctgtagtgtcttcacattatagcagaagattcaccccagaaatagccaaaagacccaaggtgagagatcaggaaggaagaatcaactactactggactctgcttgaacccggggatacaataatatttgaggcaaatggaaatctaatagcgccaaggtttgctttcgcactgagtagaggctttggatcaggaatcatcacctcaaatgcaccaatggatgaatgtgatgcgaaatgtcaaacacctcagggagctataaacagcagtcttcctttccagaatgtacacccagtcacaataggagagtgtccaaagtatgtcaggagtacaaaattaagaatggttacaggactaaggaacatcccatccattcaatccagaggtttgtttggagccattgccggtttcattgaaggggggtggactggaatggtagatggttggtatggttatcaccatcagaatgagcaaggatctgggtatgctgcagatcaaaaaagcacacaaaatgccattaacgggattacaaacaaggtgaattctgtaattgagaaaatgaacactcaattcacagctgtgggcaaagaattcaacaaattggaaagaaggatggaaaacttaaataaaaaagttgatgatgggtttctagacatttggacatataacgcagaattgttggttctactggaaaatgaaaggactttggacttccatgactccaacgtgaagaatctgtatgagaaagtaaaaagccaattaaagaataatgccaaagaaataggaaacgggtgttttgaattctatcacaagtgtaacgatgaatgcatggagagtgtgaaaaatggaacttatgactatccaaaatattccgaagaatcaaagttgaacagggagaaaattgatggagtgaaattggaatcaatgggagtctatcagattttggcgatctactcaacagtcgccagttccctggttcttttggtctccctgggggcaatcagcttctggatgtgttccaatgggtctttgcagtgtagaatatgcatctaa

SEQ ID NO: 32430 - RNA, 1698 nt, synthetic construct
  misc_feature 1..1698: note = hemagglutinin__InfluenzaA__ABV29865
  source 1..1698: mol_type = other RNA
atgaaagtaaaactactgattctgttatgtacatttacagctacatatgcagacacaatatgtataggctaccatgccaacaactcgaccgacactgttgacacagtacttgagaagaatgtgacagtgacacactctgtcaacctacttgaggacagtcacaatggaaaactatgtctactaaaaggaatagccccactacaattgggtaattgcagcgttgccggatggatcttaggaaacccagaatgcgaattgctgatttccaaggaatcatggtcctacattgtagagacaccaaatcctgagaatggaacatgttacccagggtatttcgccgactatgaggagctgagagagcaattgagttcagtatcttcatttgagaggttcgaaatattccccaaagagagctcatggcccaaccacaccgtaaccggagtatcagcatcatgctcccataacgggaaaagcagtttttacagaaatttgctatggctgacggggaagaatggtttgtatccaaacctgagcaagtcctatgcaaacaacaaagagaaagaagtccttgtactgtggggtgttcatcacccgcctaacataggggaccaaagggccctctatcatacagaaaatgcttatgtctctgtagtgtcttcacattatagcagaagattcaccccagaaatagccaaaagacccaaggtgagagatcaggaaggaagaatcaactactactggactctgcttgaacccggggatacaataatatttgaggcaaatggaaatctaatagcgccaaggtttgctttcgcactgagtagaggctttggatcaggaatcatcacctcaaatgcaccaatggatgaatgtgatgcgaaatgtcaaacacctcagggagctataaacagcagtcttcctttccagaatgtacacccagtcacaataggagagtgtccaaagtatgtcaggagtacaaaattaagaatggttacaggactaaggaacatcccatccattcaatccagaggtttatttggagccattgccggtttcattgaaggggggtggactggaatggtagatggttggtatggttatcaccatcagaatgagcaaggatctgggtatgctgcagatcaaaaaagcacacaaaatgccattaacgggattacaaacaaggtgaattctgtaattgagaaaatgaacactcaattcacagctgtgggcaaagaattcaacaaattggaaagaaggatggaaaacttaaataaaaaagttgatgatgggtttctagacatttggacatataacgcagaattgttggttctactggaaaatgaaaggactttggacttccatgactccaacgtgaagaatctgtatgagaaagtaaaaagccaattaaagaataatgccaaagaaataggaaacgggtgttttgaattctatcacaagtgtaacgatgaatgcatggagagtgtgaaaaatggaacttatgactatccaaaatattccgaagaatcaaagttgaacagggagaaaattgatggagtgaaattggaatcaatgggagtctatcagattttggcgatctactcaacagtcgccagttccctggttcttttggtctccctgggggcaatcagcttctggatgtgttccaatgggtctttgcagtgtagaatatgcatctaa

SEQ ID NO: 32431 - RNA, 1698 nt, synthetic construct
  misc_feature 1..1698: note = hemagglutinin__InfluenzaA__ABV29876
  source 1..1698: mol_type = other RNA
atgaaagtaaaactactgattttgttatgtacatttacagctacatatgcagacacaatatgtataggctaccatgccaacaactcgaccgacactgttgacacagtacttgagaagaatgtgacagtgacacactctgtcaacctacttgaggacagtcacaatggaaaactatgtctactaaaaggaatagccccactacaattgggtaattgcagcgttgccggatggatcttaggaaacccagaatgcgaattgctgatttccaaggaatcatggtcctacattgtagagacaccaaatcctgagaatggaacatgttacccagggtatttcgccgactatgaggagctgagagagcaattgagttcagtatcttcatttgagaggttcgaaatattccccaaagagagctcatggcccaaccacaccgtaaccggagtatcagcatcatgctcccataacgggaaaagcagtttttacagaaatttgctatggctgacggggaagaatggtttgtatccaaacctgagcaagtcctatgcaaacaacaaagagaaagaagtccttgtactgtggggtgttcatcacccgcctaacataggggaccaaagggccctctatcatacagaaaatgcttatgtctctgtagtgtcttcacattatagcagaagattcaccccagaaatagccaaaagacccaaggtgagagatcaggaaggaagaatcaactactactggactctgcttgaacccggggatacaataatatttgaggcaaatggaaatctaatagcgccaaggtttgctttcgcactgagtagaggctttggatcaggaatcatcacctcaaatgcaccaatggatgaatgtgatgcgaaatgtcaaacacctcagggagctataaacagcagtcttcctttccagaatgtacacccagtcacaataggagagtgtccaaagtatgtcaggagtacaaaattaagaatggttacaggactaaggaacatcccatccattcaatccagaggtttatttggagccattgccggtttcattgaaggggggtggactggaatggtagatggttggtatggttatcaccatcagaatgagcaaggatctgggtatgctgcagatcaaaaaagcacacaaaatgccattaacgggattacaaacaaggtgaattctgtaattgagaaaatgaacactcaattcacagctgtgggcaaagaattcaacaaattggaaagaaggatggaaaacttaaataaaaaagttgatgatgggtttctagacatttggacatataacgcagaattgttggttctactggaaaatgaaaggactttggacttccatgactccaacgtgaagaatctgtatgagaaagtaaaaagccaattaaagaataatgccaaagaaataggaaacgggtgttttgaattctatcacaagtgtaacgatgaatgcatggagagtgtgaaaaatggaacttatgactatccaaaatattccgaagaatcaaagttgaacagggagaaaattgatggagtgaaattggaatcaatgggagtctatcagattttggcgatctactcaacagtcgccagttccctggttcttttggtctccctgggggcaatcagcttctggatgtgttccaatgggtctttgcagtgtagaatatgcatctaa

SEQ ID NO: 32432 - RNA, 1701 nt, synthetic construct
  misc_feature 1..1701: note = hemagglutinin__InfluenzaA__ABV29898
  source 1..1701: mol_type = other RNA
atgaagactatcattgctttgagctacattctatgtctggttttcgctcaaaaacttcccggaaatgacaacagcacggcaacgctgtgccttgggcaccatgcagtaccaaacggaacgatagtgaaaacaatcacgaatgaccaaattgaagttactaatgctactgagctggttcagagttcctcaacaggtgaaatatgcgacagtcctcatcagatccttgatggagaaaactgcacactaatagatgctctattgggagaccctcagtgtgatggcttccaaaataagaaatgggacctttttgttgaacgcagcaaagcctacagcaactgttacccttatgatgtgccggattatgcctcccttaggtcactagttgcctcatccggcacactggagtttaacaatgaaagcttcaattggactggagtcactcaaaacggaacaagctctgcttgcataaggagatctaataacagtttctttagtagattgaattggttgacccacttaaaattcaaatacccagcattgaacgtgactatgccaaacaatgaaaaatttgacaaattgtacatttggggggttcaccacccgggtacggacaatgaccaaatcttcctgtatgctcaagcatcaggaagaatcacagtctctaccaaaagaagccaacaaactgtaatcccgaatatcggatctagacccagagtaaggaatatccccagcagaataagcatctattggacaatagtaaaaccgggagacatacttttgattaacagcacagggaatctaattgctcctaggggttacttcaaaatacgaagtgggaaaagctcaataatgagatcagatgcacccattggcaaatgcaattctgaatgcatcactccaaatggaagcattcccaatgacaaaccattccaaaatgtaaacaggatcacatacggggcctgtcccagatatgttaagcaaaacactctgaaattggcaacagggatgcgaaatgtaccagagaaacaaactagaggcatatttggcgcaatcgcgggtttcatagaaaatggttgggagggaatggtggatggttggtacggtttcaggcatcaaaattctgagggaataggacaagcagcagatctcaaaagcactcaagcagcaatcgatcaaatcaatgggaagctgaataggttgatcgggaaaaccaacgagaaattccatcagattgaaaaagaattctcagaagtcgaagggagaattcaggaccttgagaaatatgttgaggacaccaaaatagatctctggtcatacaacgcagagcttcttgttgccctggagaaccaacatacaattgatctaactgactcagaaatgaacaaactgtttgaaaaaacaaagaagcaactgagggaaaatgctgaggatatgggcaatggttgtttcaaaatataccacaaatgtgacaatgcctgcataggatcaatcagaaatggaacttatgaccacgatgtatacagagatgaagcattaaacaaccggttccagatcaagggcgttgagctgaagtcaggatacaaagattggatcctatggatttcctttgccatatcatgttttttgctttgtgttgctttgttggggttcatcatgtgggcctgccaaaaaggcaacattaggtgcaacatttgcatttga

SEQ ID NO: 32433 - RNA, 1701 nt, synthetic construct
  misc_feature 1..1701: note = hemagglutinin__InfluenzaA__ABV29909
  source 1..1701: mol_type = other RNA
atgaagactatcattgctttgagctacattctatgtctggttttcgctcaaaaacttcctggaaatgacaacagcacggcaacgctgtgccttgggcatcatgcagtaccaaacggaacgatagtgaaaacaatcacgagtgaccaaattgaagttactaatgctactgagctggttcagaattcctcaataggtggaatctgcaacagtcctcatcagatccttgatggagaaaactgcacactaatagatgctctattgggagaccctcagtgtgatggcttccaaaataagaaatgggacctttttgttgaacgcagcaaagcctacagcaactgttacccttatgatgtgccggattatgcctcccttaggtcactaattgcctcatccggcacactggagtttaacaatgaaagcttcaattggactggagtcactcaaaatggaacaagctctgcttgcaaaaggagatctaataacagtttctttagtagattgaattggttgacccacttaaaattcaaatacccagcattgaacgtgactatgccaaacaatgaagaatttgacaaattgtacatttggggggttcaccacccgggtacggacaatgaccaaatcagcctatatgctcaagcaccaggaagaatcacagtctctaccaaaagaagccaacaaactgtaatcccgaatatcggatctagaccccgagtaagggatatccccagcagaataagcatctattggacaatagtaaaaccgggagacatacttttgattaacagcacagggaatctaattgctcctcggggttacttcaaaatacgaagtgggaaaagctcaataatgagatcagatgcacccattgacaaatgcaattctgaatgcatcactccaaatggaagcattcccaatgacaaaccattccaaaatgtaaacaggatcacatatggggcctgtcccagatatgttaagcaaaacactctgaaattggcaacagggatgcgaaatgtaccagagaaacaaactagaggcatatttggcgcaatcgcgggtttcatagaaaatggctgggagggaatggtggatggttggtacggtttcaggcatcaaaattctgagggaataggacaagcagcagatctcaaaagcactcaagcagcaatcgaccaaatcaatgggaagctgaataggttgatcgggaaaaccaacgagaaattccatcagattgaaaaagaattctcagaagtagaagggagaattcaggacctcgagaaatatgttgaggacactaaaatagatctctggtcatacaacgcggagcttcttgttgccctggagaaccaacatacaattgacctaactgactcagaaatgaacaaattgtttgaaagaacaaaaaagcaactgagggaaaatgctgaggatatgggcaatggttgtttcaaaatataccacaaatgtgacaatgcctgcatagggtcaatcagaaatggaacttatgaccatgatgtatacagagatgaagcattaaacaaccggttccagatcaaaggtgttgagctgaagtcaggatacaaagattggatcctatggatttcctttgccatatcatgttttttgctttgtgttgctttgttggggttcatcatgtgggcctgccaaaaaggcaacattaggtgcaacatttgcatttga

SEQ ID NO: 32434 - RNA, 1698 nt, synthetic construct
  misc_feature 1..1698: note = hemagglutinin__InfluenzaA__ABV29920
  source 1..1698: mol_type = other RNA
atgaaagtaaaactacttgttctgttatgtacatttacagctacatatgcagacacaatatgtataggctaccatgccaacaactcgaccgacactgttgacacagtacttgagaagaatgtgacagtgacacactctgtcaacctacttgaggacagtcacaatggaaaactatgtctactaaaaggaatagccccactacaattgggtaattgcagcgttgccggatggatcttaggaaacccagaatgcgaattactgatttccaaggaatcatggtcctacattgtagaaacaccaaatcctgagaatggaacatgttacccaggatatttcgccgactatgaggagctgagggagcaattgagttcagtatcttcatttgagaggtttgaaatattccccaaagagagctcatggcccaaccacaccgtaaccggagtatcagcatcatgctcccataacgggaaaagcagtttttacagaaatttgctatggctgacggggaagaatggtttgtatccaaacctgagcaagtcctatgcaaacaacaaagagaaagaagtccttgtactgtggggtgttcatcacccgcctaacataggggaccaaagggccctctatcatacagaaaatgcttatgtctctgtagtgtcttcacattatagcagaagattcaccccagaaatagccaaaagacccaaggtgagagatcaggaaggaagaatcaactactactggactctgctggaacccggggatacaataatatttgaggcaaatggaaatctaatagcgccaaggtttgctttcgcactgagtagaggctttggatcaggaatcatcacctcaaatgcaccaatgggtgaatgtgatgcgaagtgtcaaacacctcagggagctataaacagtagtcttcctttccagaatgtacatccagtcacaataggagagtgtccaaagtatgtcaggagtgcaaaattaagaatggttacaggactaaggaacatcccatccattcaatccagaggtttgtttggagccattgccggtttcattgaaggggggtggactggaatggtagatggttggtatggttatcaccatcagaatgagcaaggatctgggtatgctgcagatcaaaaaagcacacaaaatgccattaacgggattacaaacaaggtgaattctgtaattgagaaaatgaacactcaattcacagctgtgggcaaagaattcaacaaattggaaagaaggatggaaaacttaaataaaaaggttgatgatgggtttctagacatttggacatataacgcagaattgttggttctactggaaaatgaaaggactttggacttccatgactccaacgtgaagaatctgtatgagaaagtaaaaagccaattaaagaataatgccaaagaaataggaaacgggtgttttgaattctatcacaagtgtaacgatgaatgcatggagagtgtgaaaaatggaacttatgactatccaaaatattccgaagaatcaaagttgaacagggagaaaattgatggagtgaaattggaatcaatgggagtctatcagattctggcgatctactcaacagtcgccagttccctggttcttttggtctccctgggggcaatcagcttctggatgtgttccaatgggtctttgcagtgtagaatatgcatctaa

SEQ ID NO: 32435 - RNA, 1698 nt, synthetic construct
  misc_feature 1..1698: note = hemagglutinin__InfluenzaA__ABV29942
  source 1..1698: mol_type = other RNA
atgaaagtaaaactacttgttctgttatgtacatttacagctacatatgcagacacaatatgtataggctaccatgccaacaactcgactgacactgttgacacagtacttgagaagaatgtgacagtgacacactctgtcaacctacttgaggacagtcacaatggaaaactatgtctactaaaaggaatagccccactacaattgggtaattgcagcgttgccggatggatcttaggaaacccagaatgcgaattactgatttccaaggaatcatggtcctacattgtagaaacaccaaatcctgagaatggaacatgttacccaggatatttcgccgactatgaggagctgagggagcaattgagttcagtatcttcatttgagaggttcgaaatattccccaaagagagctcatggcccaaccacaccgtaaccggagtatcagcatcatgctcccataacggggaaagcagtttttacagaaatttgttatggctgacggggaagaatggtttgtatccaaacctgagcaagtcctatgcaaacaacaaagagaaagaagtccttgtactgtggggtgttcatcacccgcctaacataggagaccaaagggccctctatcatacagaaaatgcttatgtctctgtagtgtcttcacattatagcagaagattcaccccagaaatagccaaaagacccaaggtgagagatcaggaaggaagaatcaactactactggactctgctggaacccggggatacaataatatttgaggcaaatggaaatctaatagcgccaaggtttgctttcgcactgagtagaggctttggatcaggaatcatcacctcaaatgcaccaatggataaatgtgatgcgaagtgccaaacacctcagggagctataaacagcagtcttcctttccagaatgtacacccagtcacaataggagagtgtccaaagtatgtcaggagtacaaaattaagaatggttacaggactaaggaacatcccatccattcaatccagaggtttgtttggagccattgccggtttcattgaaggggggtggactggaatggtagatggttggtatggttatcaccatcagaatgagcaaggatctgggtatgctgcagatcaaaaaagcacacaaaatgccattaacgggattacaaacaaggtgaattctgtaattgagaaaatgaacactcaattcacagctgtgggcaaagaattcaacaaattggaaagaaggatggaaaatttaaataaaaaggttgatgatgggtttctagacatttggacatataatgcagaattgttggttctactggaaaatgaaaggactttggacttccatgactccaacgtgaagaatctgtatgagaaagtaaaaagccaattaaagaataatgccaaagaaataggaaacgggtgttttgaattctatcacaagtgtaacgatgaatgcatggagagtgtgaaaaatggaacttatgactatccaaaatattccgaagaatcaaagttgaacagggagaaaattgatggagtgaaattggaatcaatgggagtctatcagattctggcgatctactcaacagtcgccagttccttggttcttttggtctccctgggggcaatcagcttctggatgtgttccaatgggtctttgcagtgtagaatatgcatctaa

SEQ ID NO: 32436 - RNA, 1698 nt, synthetic construct
  misc_feature 1..1698: note = hemagglutinin__InfluenzaA__ABV29953
  source 1..1698: mol_type = other RNA
atgaaagtaaaactactggttctgttatgtacatttacagctacatatgcagacacaatatgtataggctaccatgccaacaactcgaccgacactgttgacacagtacttgagaagaatgtgacagtgacacactctgtcaacctacttgaggacagtcacaatggaaaactatgtctactaaaaggaatagccccactacaattgggtaattgcagcgttgccggatggatcttaggaaacccagaatgcgaattactgatttccaaggaatcatggtcctacattgtagagacaccaaatcctgagaatggaacatgttacccagggtatttcgccgactatgaggagctgagagagcaattgagttcagtatcttcatttgagaggttcgaaatattccccaaagagagctcatggcccaaccacaccgtaaccggagtatcagcatcatgctcccataacgggaaaagcagtttttacagaaatttgctatggctgacggggaagaatggtttgtatccaaacctgagcaagtcctatgcaaacaacaaagagaaagaagtccttgtactgtggggtgttcatcacccgcctaacataggggaccaaagggccctctatcatacagaaaatgcttatgtctctgtagtgtcttcacattatagcagaagattcaccccagaaatagccaaaagacccaaggtgagagatcaggaaggaagaatcaactactactggactctgcttgaacccggggatacaataatatttgaggcaaatggaaatctaatagcgccaaggtttgctttcgcactgagtagaggctttggatcaggaatcatcacctcaaatgcaccaatggatgaatgtgatgcgaaatgtcaaacacctcagggagctataaacagcagtcttcctttccagaatgtacacccagtcacaataggagagtgtccaaagtatgtcaggagtacaaaattaagaatggttacaggactaaggaacatcccatccattcaatccagaggtttgtttggagccattgccggtttcattgaaggggggtggactggaatggtagatggttggtatggttatcaccatcagaatgagcaaggatctgggtatgctgcagatcaaaaaagcacacaaaatgccattaacgggattacaaacaaggtaaattctgtaattgagaaaatgaacactcaattcacagctgtgggcaaagaattcaacaaattggaaagaaggatggaaaacttaaataaaaaagttgatgatgggtttctagacatttggacatataacgcagaattgttggttctactggaaaatgaaaggactttggacttccatgactccaacgtgaagaatctgtatgagaaagtaaaaagccaattaaagaataatgccaaagaaataggaaacgggtgttttgaattctatcacaagtgtaacgatgaatgcatggagagtgtgaaaaatggaacttatgactatccaaaatattccgaagaatcaaagttgaacagggagaaaattgatggagtgaaattggaatcaatgggagtctatcagattttggcgatctactcaacagtcgccagttccctggttcttttggtctccctgggggcaatcagcttctggatgtgttccaatgggtctttgcagtgtagaatatgcatctaa

SEQ ID NO: 32437 - RNA, 1698 nt, synthetic construct
  misc_feature 1..1698: note = hemagglutinin__InfluenzaA__ABV29964
  source 1..1698: mol_type = other RNA
atgaaagtaaaactactggttctgttatgtacatttacagctacatatgcagacacaatatgtataggctaccatgccaacaactcgaccgacactgttgacacagtacttgagaagaatgtgacagtgacacactctgtcaacctacttgaggacagtcacaatggaaaactatgtctactaaaaggaatagccccactacaattgggtaattgcagcgttgccggatggatcttaggaaacccagaatgcgaattactgatttccaaggaatcatggtcctacattgtagagacaccaaatcctgagaatggaacatgttacccagggtatttcgccgactatgaggagctgagagagcaattgagttcagtatcttcatttgagaggttcgaaatattccccaaagagagctcatggcccaaccacaccgtaaccggagtatcagcatcatgctcccataacgggaaaagcagtttttacagaaatttgctatggctgacggggaagaatggtttgtatccaaacctgagcaagtcctatgcaaacaacaaagagaaagaagtccttgtactgtggggtgttcatcacccgcctaacataggggaccaaagggccctctatcatacagaaaatgcttatgtctctgtagtgtcttcacattatagcagaagattcaccccagaaatagccaaaagacccaaggtgagagatcaggaaggaagaatcaactactactggactctgcttgaacccggggatacaataatatttgaggcaaatggaaatctaatagcgccaaggtttgctttcgcactgagtagaggctttggatcaggaatcatcacctcaaatgcaccaatggatgaatgtgatgcgaaatgtcaaacacctcagggagctataaacagcagtcttcctttccagaatgtacacccagtcacaataggagagtgtccaaagtatgtcaggagtacaaaattaagaatggttacaggactaaggaacatcccatccattcaatccagaggtttgtttggagccattgccggtttcattgaaggggggtggactggaatggtagatggttggtatggttatcaccatcagaatgagcaaggatctgggtatgctgcagatcaaaaaagcacacaaaatgccattaacgggattacaaacaaggtgaattctgtaattgagaaaatgaacactcaattcacagctgtgggcaaagaattcaacaaattggaaagaaggatggaaaacttaaataaaaaagttgatgatgggtttctagacatttggacatataacgctgaattgttggttctactggaaaatgaaaggactttggacttccatgactccaacgtgaagaatctgtatgagaaagtaaaaagccaattaaagaataatgccaaagaaataggaaacgggtgttttgaattctatcacaagtgtaacgatgaatgcatggagagtgtgaaaaatggaacttatgactatccaaaatattccgaagaatcaaagttgaacagggagaaaattgatggagtgaaattggaatcaatgggagtctatcagattttggcgatctactcaacagtcgccagttccctggttcttttggtctccctgggggcaatcagcttctggatgtgttccaatgggtctttgcagtgtagaatatgcatctaa

SEQ ID NO: 32438 - RNA, 1698 nt, synthetic construct
  misc_feature 1..1698: note = hemagglutinin__InfluenzaA__ABV29986
  source 1..1698: mol_type = other RNA
atgaaagtaaaactactgattctgttatgtacatttacagctacatatgcagacacaatatgtataggctaccatgccaacaactcgaccgacactgttgacacagtacttgagaagaatgtgacagtgacacactctgtcaacctacttgaggacagtcacaatggaaaactatgtctactaaaaggaatagccccactacaattgggtaattgcagcgttgccggatggattttaggaaacccagaatgcgaattgctgatttccaaggaatcatggtcctacattgtagagacaccaaatcctgagaatggaacatgttacccagggtatttcgccgactatgaggagctgagagagcaattgagttcagtatcttcatttgagaggttcgaaatattccccaaagagagctcatggcccaaccacaccgtaaccggagtatcagcatcatgctcccataacgggaaaagcagtttttacagaaatttgctatggctgacggggaagaatggtttgtatccaaacctgagcaagtcctatgcaaacaacaaagagaaagaagtccttgtactgtggggtgttcatcacccgcctaacataggggaccaaagggccctctatcatacagaaaatgcttatgtctctgtagtgtcttcacattatagcagaagattcaccccagaaatagccaaaagacccaaggtgagagatcaggaaggaagaatcaactactactggactctgcttgaacccggggatacaataatatttgaggcaaatggaaatctaatagcaccaaggtttgctttcgcactgagtagaggctttggatcaggaatcatcacctcaaatgcaccaatggatgaatgtgatgcgaaatgtcaaacacctcagggagctataaacagcagtcttcctttccagaatgtacacccagtcacaataggagagtgtccaaagtatgtcaggagtacaaaattaagaatggttacaggactaaggaacatcccatccattcaatccagaggtttatttggagccattgccggtttcattgaaggggggtggactggaatggtagatggttggtatggttatcaccatcagaatgagcaaggatctgggtatgctgcagatcaaaaaagcacacaaaatgccattaacgggattacaaacaaggtgaattctgtaattgagaaaatgaacactcaattcacagctgtgggcaaagaattcaacaaattggaaagaaggatggaaaacttaaataaaaaagttgatgatgggtttctagacatttggacatataacgcagaattgttggttctactggaaaatgaaaggactttggacttccatgactccaacgtgaagaatctgtatgagaaagtaaaaagccaattaaagaataatgccaaagaaataggaaacgggtgttttgaattctatcacaagtgtaacgatgaatgcatggagagtgtgaaaaatggaacttatgactatccaaaatattccgaagaatcaaagttgaacagggagaaaattgatggagtgaaattggaatcaatgggagtctatcagattttggcgatctactcaacagtcgccagttccctggttcttttggtctccctgggggcaatcagcttctggatgtgttccaatgggtctttgcagtgtagaatatgcatctaa

SEQ ID NO: 32439 - RNA, 1698 nt, synthetic construct
  misc_feature 1..1698: note = hemagglutinin__InfluenzaA__ABV29997
  source 1..1698: mol_type = other RNA
atgaaagtaaaactactggttctgttatgtacatttacagctacatatgcagacacaatatgtataggctaccatgccaacaactcgaccgacactgttgacacagtacttgagaagaatgtgacagtgacacactctgtcaacctacttgaggacagtcacaatggaaaactatgtctactaaaaggaatagccccactacaattgggtaattgcagcgttgccggatggatcttaggaaacccagaatgcgaattactgatttccaaggaatcatggtcctacattgtagagacaccaaatcctgagaatggaacatgttacccagggtatttcgccgactatgaggagctgagagagcaattgagttcagtatcttcatttgagaggttcgaaatattccccaaagagagctcatggcccaaccacaccgtaaccggagtatcagcatcatgctcccataacgggaaaagcagtttttacagaaatttgctatggctgacggggaagaatggtttgtatccaaacctgagcaagtcctatgcaaacaacaaagagaaagaagtccttgtactgtggggggttcatcacccgcctaacataggggaccaaagggccctctatcatacagaaaatgcttatgtctctgtagtgtcttcacattatagcagaagattcaccccagaaatagccaaaagacccaaggtgagagatcaggaaggaagaatcaactactactggactctgcttgaacccggggatacaataatatttgaggcaaatggaaatctaatagcgccaaggtttgctttcgcactgagtagaggctttggatcaggaatcatcacctcaaatgcaccaatggatgaatgtgatgcgaaatgtcaaacacctcagggagctataaacagcagtcttcctttccagaatgtacacccagtcacaataggagagtgtccaaagtatgtcaggagtacaaaattaagaatggttacaggactaaggaacatcccatccattcaatccagaggtttgtttggagccattgccggtttcattgaaggggggtggactggaatggtagatggatggtatggttaccaccatcagaatgagcaaggatctgggtatgctgctgatcaaaaaagcacacaaaatgccattaacgggattacaaacaaggtgaattctgtaattgagaaaatgaacactcaattcacagctgtgggcaaagaattcaacaaattggaaagaaggatggaaaacttaaataaaaaagttgatgatgggtttctagacatttggacatataacgcagaattgttggttctactggaaaatgaaaggactttggacttccatgactccaacgtgaagaatctgtatgagaaagtaaaaagccaattaaagaataatgccaaagaaataggaaacgggtgttttgaattctatcacaagtgtaacgatgaatgcatggagagtgtgaaaaatggaacttatgactatccaaaatattccgaagaatcaaagttgaacagggagaaaattgatggagtgaaattggaatcaatgggagtctatcagattttggcgatctactcaacagtcgccagttccctggttcttttggtctccctgggggcaatcagcttctggatgtgttccaatgggtctttgcagtgtagaatatgcatctaa

SEQ ID NO: 32440 - RNA, 1698 nt, synthetic construct
  misc_feature 1..1698: note = hemagglutinin__InfluenzaA__ABV30008
  source 1..1698: mol_type = other RNA
atgaaagtaaaactactgattctgttatgtacatttacagctacatatgcagacacaatatgtataggctaccatgccaacaactcgaccgacactgttgacacagtacttgagaagaatgtgacagtgacacactctgtcaacctacttgaggacagtcacaatggaaaactatgtctactaaaaggaatagccccactacaattgggtaattgcagcgttgccggatggatcttaggaaacccagaatgcgaattactgatttccaaggaatcatggtcctacattgtagagacaccaaatcctgagaatggaacatgttacccagggtatttcgccgactatgaggagctgagagagcaattgagttcagtatcttcatttgagaggttcgaaatattccccaaagagagctcatggcccaaccacaccgtaaccggagtatcagcatcatgctcccataacgggaaaagcagtttttacagaaatttgctatggctgacggggaagaatggtttgtatccaaacctgagcaagtcctatgcaaacaacaaagagaaagaagtccttgtactgtggggtgttcatcacccgcctaacataggggaccaaagggccctctatcatacagaaaatgcttatgtctctgtagtgtcttcacattatagcagaagattcaccccagaaatagccaaaagacccaaggtgagagatcaggaaggaagaatcaactactactggactctgcttgaacccggggatacaataatatttgaggcaaatggaaatctaatagcgccaaggtttgctttcgcactgagtagaggctttggatcaggaatcatcacctcaaatgcaccaatggatgaatgtgatgcgaaatgtcaaacacctcagggagctataaacagcagtcttcctttccagaacgtacacccagtcacaataggagagtgtccaaagtatgtcaggagtacaaaattaagaatggttacaggactaaggaacatcccatccattcaatccagaggtttatttggagccattgccggtttcattgaaggggggtggactggaatggtagatggttggtatggttatcaccatcagaatgagcaaggatctgggtatgctgcagatcaaaaaagcacacaaaatgccattaacgggattacaaacaaggtgaattctgtaattgaaaaaatgaacactcaattcacagctgtgggcaaagaattcaacaaattggaaagaaggatggaaaacttaaataaaaaagttgatgatgggtttctagacatttggacatataacgcagaattgttggttctactggaaaatgaaaggactttggacttccatgactccaacgtgaagaatctgtatgagaaagtaaaaagccaattaaagaataatgccaaagaaataggaaacgggtgttttgaattctatcacaagtgtaacgatgaatgcatggagagtgtgaaaaatggaacttatgactatccaaaatattccgaagaatcaaagttgaacagggagaaaattgatggagtgaaattggaatcaatgggagtctatcagattttggcgatctactcaacagtcgccagttccctggttcttttggtctccctgggggcaatcagcttctggatgtgttccaatgggtctttgcagtgtagaatatgcatctaa

SEQ ID NO: 32441 - RNA, 1698 nt, synthetic construct
  misc_feature 1..1698: note = hemagglutinin__InfluenzaA__ABV30019
  source 1..1698: mol_type = other RNA
atgaaagtaaaactactggttctgttatgtacatttacagctacatatgcagacacaatatgtataggctaccatgccaacaactcgaccgacactgttgacacagtacttgagaagaatgtgacagtgacacactctgtcaacctacttgaggacagtcacaatggaaaactatgtctactaaaaggaatagccccactacaattgggtaattgcagcgttgccggatggatcttaggaaacccagaatgcgaattactgatttccaaggaatcatggtcctacattgtggagacaccaaatcctgagaatggaacatgttacccagggtatttcgccgactatgaggagctgagagagcaattgagttcagtatcttcatttgagaggttcgaaatattccccaaagagagctcatggcccaaccacaccgtaaccggagtatcagcatcatgctcccataacgggaaaagcagtttttacagaaatttgctatggctgacggggaagaatggtttgtatccaaacctgagcaagtcctatgcaaacaacaaagagaaagaagtccttgtactgtggggtgttcatcacccgcctaacataggggaccaaagggccctctatcatacagaaaatgcttatgtctctgtagtgtcttcacattatagcagaagattcaccccagaaatagccaaaagacccaaggtgagagatcaggaaggaagaatcaactactactggactctgcttgaacccggggatacaataatatttgaggcaaatggaaatctaatagcgccaaggtttgctttcgcactgagtagaggctttggatcaggaatcatcacctcaaatgcaccaatggatgaatgtgatgcgaaatgtcaaacacctcagggagctataaacagcagtcttcctttccagaatgtacacccagtcacaataggagagtgtccaaagtatgtcaggagtacaaaattaagaatggttacaggactaaggaacatcccatccattcaatccagaggtttgtttggagccattgccggtttcattgaaggggggtggactggaatggtagatggttggtatggttatcaccatcagaatgagcaaggatctgggtatgctgcagatcaaaaaagcacacaaaatgccattaacgggattacaaacaaggtgaattctgtaattgagaaaatgaacactcaattcacagctgtgggcaaagaattcaacaaattggaaagaaggatggaaaacttaaataaaaaagttgatgatgggtttctagacatttggacatataacgcagaattgttggttctactggaaaatgaaaggactttggacttccatgactccaacgtgaagaatctgtatgagaaagtaaaaagccaattaaagaataatgccaaagaaataggaaacgggtgttttgaattctatcacaagtgtaacgatgaatgcatggagagtgtgaaaaatggaacttatgactatccaaaatattccgaagaatcaaagttgaacagggagaaaattgatggagtgaaattggaatcaatgggagtctatcagattttggcgatctactcaacagtcgccagttccctggttcttttggtctccctgggggcaatcagcttctggatgtgttccaatgggtctttgcagtgtagaatatgcatctaa

SEQ ID NO: 32442 - RNA, 1698 nt, synthetic construct
  misc_feature 1..1698: note = hemagglutinin__InfluenzaA__ABV30030
  source 1..1698: mol_type = other RNA
atgaaagtaaaactactggttctgttatgtacatttacagctacatatgcagacacaatatgtataggctaccatgccaacaactcgaccgacactgttgacacagtacttgagaaaaatgtgacagtgacacactctgtcaacctacttgaggacagtcacaatggaaaactatgtctactaaaaggaatagccccactacaattgggtaattgcagcgttgccggatggatcttaggaaacccagaatgcgaattactgatttccaaggaatcatggtcctacattgtagagacaccaaatcctgagaatggaacatgttacccagggtatttcgccgactatgaggagctgagagagcaattgagttcagtatcttcatttgagaggttcgaaatattccccaaagagagctcatggcccaaccacaccgtaaccggagtatcagcatcatgctcccataacgggaaaagcagtttttacagaaatttgctatggctgacggggaagaatggtttgtatccaaacctgagcaagtcctatgcaaacaacaaagagaaagaagtccttgtactgtggggtgttcatcacccgcctaacataggggaccaaagggccctctatcatacagaaaatgcttatgtctctgtagtgtcttcacattatagcagaagattcaccccagaaatagccaaaagacccaaggtgagagatcaggaaggaagaatcaactactactggactctgcttgaacccggggatacaataatatttgaggcaaatggaaatctaatagcgccaaggtttgctttcgcactgagtagaggctttggatcaggaatcatcacctcaaatgcaccaatggatgaatgtgatgcgaaatgtcaaacacctcagggagctataaacagcagtcttcctttccagaatgtacacccagtcacaataggagagtgtccaaagtatgtcaggagtacaaaattaagaatggttacaggactaaggaacatcccatccattcaatccagaggtttgtttggagccattgccggtttcattgaaggggggtggactggaatggtagatggatggtatggttaccaccatcagaatgagcaaggatctgggtatgctgctgatcaaaaaagcacacaaaatgccattaacgggattacaaacaaggtgaattctgtaattgagaaaatgaacactcaattcacagctgtgggcaaagaattcaacaaattggaaagaaggatggaaaacttaaataaaaaagttgatgatgggtttctagacatttggacatataacgcagaattgttggttctactggaaaatgaaaggactttggacttccatgattccaacgtgaagaatctgtatgagaaagtaaaaagccaattaaagaataatgccaaagaaataggaaacgggtgttttgaattctatcacaagtgtaacgatgaatgcatggagagtgtgaaaaatggaacttatgactatccaaaatattccgaagaatcaaagttgaacagggagaaaattgatggagtgaaattggaatcaatgggagtctatcagattttggcgatctactcaacagtcgccagttccctggttcttttggtctccctgggggcaatcagcttctggatgtgttccaatgggtctttgcagtgtagaatatgcatctaa

SEQ ID NO: 32443 - RNA, 1698 nt, synthetic construct
  misc_feature 1..1698: note = hemagglutinin__InfluenzaA__ABV30041
  source 1..1698: mol_type = other RNA
atgaaagtaaaactacttgttctgttatgtacatttacagctacatatgcagacacaatatgtataggctaccatgccaacaactcgaccgacactgttgacacagtacttgagaagaatgtgacagtgacacactctgtcaacctacttgaggacagccacaatggaaaactatgtctactaaaaggaacagccccactacaattgggtaattgcagcgttgccggatggatcttaggaaacccagaatgcgaattactgatttctaaggaatcatggtcctacattgtagaaacaccaaatcctgagaatggaacatgttacccaggatatttcgccgactatgaggagctgagggagcaattgagttcagtatcttcatttgagaggttcgaaatattccccaaagagagctcatggcccaaccacaccgtaaccggagtatcagcatcatgctcccataacgggaaaagcagtttttacagaaatttgctatggctgacggggaagaatggtttgtatccaaacctgagcaagtcctatgcaaacaacaaagagaaagaagtccttgtactgtggggtgttcatcacccgcctaacataggggaccaaagggccctctatcatacagaaaatgcttatgtctctgtagtgtcttcacattatagcagaagattcaccccagaaatagccaaaagacccaaggtgagagatcaggaaggaagaatcaactactactggactctgctggaacccggggatacaataatatttgaggcaaatggaaatctaatagcgccaaggtttgctttcgcactgagtagaggctttggatcaggaatcatcacctcaaatgcaccaatgggtgaatgtgatgcgaagtgtcaaacacctcagggagctataaacagtagtcttcctttccagaatgtacacccagtcacaataggagagtgtccaaagtatgtcaggagtgcaaaattaagaatggttacagggctaaggaacatcccatccattcaatccagaggtttgtttggagccattgccggtttcattgaaggggggtggactggaatggtagatggttggtatggttatcaccatcagaatgagcaaggatctgggtatgctgcagatcaaaaaagcacacaaaatgccattaacgggattacaaacaaggtgaattctgtaattgagaaaatgaacactcaattcacagctgtgggcaaagaattcaacaaattggaaagaaggatggaaaacttaaataaaaaggttgatgatgggtttctagacatttggacatataacgcagaattgttggttctactggaaaatgaaaggactttggacttccatgactccaacgtgaagaatctgtatgagaaagtgaaaaaccaattaaagaataatgccaaagaaataggaaacgggtgttttgaattctatcacaagtgtaacgatgaatgcatggagagtgtgaaaaatggaacttatgactatccaaaatattccgaagaatcaaagttgaacagggagaaaattgatggagtgaaattggaatcaatgggagtctatcagattctggcgatctactcaacagtcgccagttccctggttcttttgatctccctgggggcaatcagcttctggatgtgttccaatgggtctttacagtgtagaatatgcatctaa

SEQ ID NO: 32444 - RNA, 1701 nt, synthetic construct
  misc_feature 1..1701: note = hemagglutinin__InfluenzaA__ABV30063
  source 1..1701: mol_type = other RNA
atgaagactatcattgctttgagctacattctatgtctggttttcgctcaaaaacttcctggaaatgacaacagcacggcaacgctgtgccttgggcaccatgcagtaccaaacggaacgatagtgaaaacaatcacgaatgaccaaattgaagttactaatgctactgagctggttcagagttcctcaacaggtgaaatatgcgacagtcctcatcagatccttgatggagaaaactgcacactaatagatgctctattgggagaccctcagtgtgatggcttccaaaataagaaatgggacctttttgttgaacgcagcaaagcctacagcaactgttacccttatgatgtgccggattatgcctcccttaggtcactagttgcctcatccggcacactggagtttaacaatgaaagcttcaattggactggagtcactcaaaacggaacaagctctgcttgcataaggagatctaataacagtttcttcagtagattgaattggttgacccacttaaaattcaaatacccagcattgaacgtgactatgccaaacaatgaaaaatttgacaaattgtacatttggggggttcaccacccgggtacggacaatgaccaaatcttcctgtatgctcaagcatcaggaagaatcacagtctctaccaaaagaagccaacaaactgtaataccgaatatcggatctagacccagagtaaggaatatccccagcagaataagcatctattggacaatagtaaaaccgggagacatacttttgattaacagcacagggaatctaattgctcctaggggttacttcaaaatacgaagtgggaaaagctcaataatgagatcagatgcacccattggcaaatgcaattctgaatgcatcactccaaatggaagcattcccaatgacaaaccattccaaaatgtaaacaggatcacatacggggcctgtcccagatatgttaagcaaaacactctgaaattggcaacagggatgcgaaatgtaccagagaaacaaactagaggcatatttggcgcaatcgcgggtttcatagaaaatggttgggagggaatggtggatggttggtacggtttcaggcatcaaaattctgagggaataggacaagcagcagatctcaaaagcactcaagcagcaatcgatcaaatcaatgggaagctgaataggttgatcgggaaaaccaacgagaaattccatcagattgaaaaagaattctcagaagtcgaagggaggattcaggaccttgagaaatatgttgaggacaccaaaatagatctctggtcatacaacgcggagcttcttgttgccctggagaaccaacatacaattgatctaactgactcagaaatgaacaaactgtttgaaaaaacaaagaagcaactgagggaaaatgctgaggatatgggcaatggttgtttcaaaatataccacaaatgtgacaatgcctgcataggatcaatcagaaatggaacttatgaccacgatgtatacagagatgaagcattaaacaaccggttccagatcaagggcgttgagctgaagtcaggatacaaagattggatcctatggatttcctttgccatatcatgttttttgctttgtgttgctttgttggggttcatcatgtgggcctgccaaaaaggcaacattaggtgcaacatttgcatttga

SEQ ID NO: 32445 - RNA, 1701 nt, synthetic construct
  misc_feature 1..1701: note = hemagglutinin__InfluenzaA__ABV30074
  source 1..1701: mol_type = other RNA
atgaagactatcattgctttgagctacattctatgtctggttttcgctcaaaaacttcctggaaatgacaacagcacggcaacgctgtgccttgggcaccatgcagtaccaaacggaacgatagtgaaaacaatcacgaatgaccaaattgaagttactaatgctactgagctggttcagagttcctcaacaggtgaaatatgcgacagtcctcatcagatccttgatggagaaaactgcacactaatagatgctctattgggagaccctcagtgtgatggcttccaaaataagaaatgggacctttttgttgaacgcagcaaagcctacagcaactgttacccttatgatgtgccggattatgcctcccttaggtcactagttgcctcatccggcacactggagtttaacaatgaaagcttcaattggactggagtcactcaaaacggaacaagctctgcttgcataaggagatctaataacagtttctttagtagattgaattggttgacccacttaaaattcaaatacccagcattgaacgtgactatgccaaacaatgaaaaatttgacaaattgtacatttggggggttcaccacccgggtacggacaatgaccaaatcttcctgtatgctcaagcatcaggaagaatcacagtctctaccaaaagaagccaacaaactgtaatcccgaatatcggatctagacccagagtaaggaatatccccagcagaataagcatctattggacaatagtaaaaccgggagacatacttttgattaacagcacagggaatctaattgctcctaggggttacttcaaaatacgaagtgggaaaagctcaataatgagatcagatgcacccattggcaaatgcaattctgaatgcatcactccaaatggaagcattcccaatgacaaaccattccaaaatgtaaacaggatcacatacggggcctgtcccagatatgttaagcaaaacactctgaaattggcaacagggatgcgaaatgtaccagagaaacaaactagaggcatatttggcgcaatcgcgggtttcatagaaaatggttgggagggaatggtggatggttggtacggtttcaggcatcaaaattctgagggaataggacaagcagcagatctcaaaagcactcaagcagcaatcgatcaaatcaatgggaagctgaataggttgatcgggaaaaccaacgagaaattccatcagattgaaaaagaattctcagaagtcgaagggaggattcaggaccttgagaaatatgttgaggacaccaaaatagatctctggtcatacaacgcggagcttcttgttgccctggagaaccaacatacaattgatctaactgactcagaaatgaacaaactgtttgaaaaaacaaagaagcaactgagggaaaatgctgaggatatgggcaatggttgtttcaaaatataccacaaatgtgacaatgcctgcataggatcaatcagaaatggaacttatgaccacgatgtatacagagatgaagcattaaacaaccggttccagatcaagggcgttgagctgaagtcaggatacaaagattggatcctatggatttcctttgccatatcatgttttttgctttgtgttgctttgttggggttcatcatgtgggcctgccaaaaaggcaacattaggtgcaacatttgcatttga

SEQ ID NO: 32446 - RNA, 1698 nt, synthetic construct; identical to SEQ ID NO: 32439
  misc_feature 1..1698: note = hemagglutinin__InfluenzaA__ABV30085
  source 1..1698: mol_type = other RNA

SEQ ID NO: 32447 - RNA, 1698 nt, synthetic construct; identical to SEQ ID NO: 32439
  misc_feature 1..1698: note = hemagglutinin__InfluenzaA__ABV30096
  source 1..1698: mol_type = other RNA

SEQ ID NO: 32448 - RNA, 1698 nt, synthetic construct; identical to SEQ ID NO: 32430
  misc_feature 1..1698: note = hemagglutinin__InfluenzaA__ABV30107
  source 1..1698: mol_type = other RNA

SEQ ID NO: 32449 - RNA, 1698 nt, synthetic construct
  misc_feature 1..1698: note = hemagglutinin__InfluenzaA__ABV30129
  source 1..1698: mol_type = other RNA
atgaaagtaaaactactggttctgttatgtacatttacagctacatatgcagacacaatatgtataggctaccatgccaacaactcgaccgacactgttgacacagtacttgagaagaatgtgacagtgacacactctgtcaacctacttgaggacagtcacaatggaaaactatgtctactaaaaggaatagccccactacaattgggtaattgcagcgttgccggatggatcttaggaaacccagaatgcgaattactgatttccaaggaatcatggtcctacattgtagagacaccaaatcctgagaatggaacatgttacccagggaatttcgccgactatgaggagctgagagagcaattgagttcagtatcttcatttgagaggttcgaaatattccccaaagagagctcatggcccaaccacaccgtaaccggagtatcagcatcatgctcccataacgggaaaagcagtttttacagaaatttgctatggctgacggggaagaatggtttgtatccaaacctgagcaagtcctatgcaaacaacaaagagaaagaagtccttgtactgtggggtgttcatcacccgcctaacataggggaccaaagggccctctatcatacagaaaatgcttatgtctctgtagtgtcttcacattatagcagaagattcaccccagaaatagccaaaagacccaaggtgagagatcaggaaggaagaatcaactactactggactctgcttgaacccggggatacaataatatttgaggcaaatggaaatctaatagcgccaaggtttgctttcgcactgagtagaggctttggatcaggaatcatcacctcaaatgcaccaatggatgaatgtgatgcgaaatgtcaaacacctcagggagctataaacagcagccttcctttccagaatgtacacccagtcacaataggagagtgtccaaagtatgtcaggagtgcaaaattaagaatggttacagggctaaggaacatcccatccattcaatccagaggtttgtttggagccattgccggtttcattgaaggggggtggactggaatggtagatggttggtatggttatcaccatcagaatgagcaaggatctgggtatgctgcagatcaaaaaagcacacaaaatgccattaacgggattacaaacaaggtgaattctgtaattgagaaaatgaacactcaattcacagctgtgggcaaagaattcaacaaattggaaagaaggatggaaaacttaaataaaaaagttgatgatgggtttctagacatttggacatataacgcagaattgttggttctactggaaaatgaaaggactttggacttccatgactccaacgtgaagaatctgtatgagaaagtaaaaagccaattaaagaataatgccaaagaaataggaaacgggtgttttgaattctatcacaaatgtaacgatgaatgcatggagagtgtgaaaaatggaacttatgactatccaaaatattccgaagaatcaaagttgaacagggagaaaattgatggagtgaaattggaatcaatgggagtctatcagattttggcgatctactcaacagtcgccagttccctggttcttttggtctccctgggggcaatcagcttctggatgtgttccaatgggtctttgcagtgtagaatatgcatctaa

SEQ ID NO: 32450 - RNA, 1698 nt, synthetic construct
  misc_feature 1..1698: note = hemagglutinin__InfluenzaA__ABV30140
  source 1..1698: mol_type = other RNA
atgaaagtgaaactactggttctgttatgtacatttacagctacatatgcagacacaatatgtataggctaccatgccaacaactcgaccgacactgttgacacagtacttgagaagaatgtgacagtgacacactctgtcaacctacttgaggaccgtcacaatggaaaactatgtctactaaaaggaatagccccactaaaattgggtaattgcagcgttgccggatggatcttaggaaacccagaatgcgaattactgatttccaaggaatcatggtcctacattgtagaaacaccaaatcctgagaatggaacatgttacccagggtatttcgccgactatgaggagctgagggagcaattgagttcagtatcttcatttgagaggttcgaaatattccccaaagagagctcatggcccaatcacaccgtaaccggagtatcagcatcatgctcccataacgggaaaagcagtttttacagaaatttgctatggctgacgggaaagaatggtttgtacccaaacctgagcagatcctatgcaaacaacaaagagaaagaagtccttgtactgtggggtgttcatcacccgcctaacataggggaccaaagggccctctatcatacagaaaatgcttatgtctctgtagtgtcttcacattatagcagaagattcaccccagaaatagccaaaagacccaaggtgagagatcaggaaggaagaatcaattactactggactctactggaacccggggatacaataatatttgaggcaaatgggaatctaatagcgccaaggtttgctttcgcactgagtagaggctttggatcaggaatcatcacctcaaatgcaccaatggatgaatgtgatgcgaagtgtcaaacacctcagggagctataaacagcagtcttcctttccagaatgtacacccagtcacaataggagagtgtccaaagtatgtcaggagtgcaaaattaagaatggttacaggactaaggaacatcccatccattcaatccagaggtttgtttggagccattgccggtttcattgaaggggggtggactggaatggtagatggttggtatggttatcaccaccagaatgagcaaggatctgggtatgctgcagatcaaaaaagcacacaaaatgccattaacgggattacaaacaaggtgaattctgtgattgagaaaatgaacactcaattcacagctgtgggcaaagaattcaacaaattggaaagaagaatggaaaacttaaataaaaaagttgatgatgggtttctagacatttggacgtataacgcagaattgttggttctactggaaaatgaaaggactttggacttccatgactccaacgtgaagaatctgtatgagaaagtaaaaagccaattaaagaataatgccaaagaaataggaaacgggtgttttgaattctatcacaagtgtaacgatgaatgcatggagagtgtgaaaaatggaacttatgactatccaaaatattccgaagaatcaaagttaaacagggagaaaattgatggagtgaaattggaatcaatgggagtctatcagattctggcgatctactcaacagtcgccagttccctggttcttttggtctccctgggggcaatcagcttctggatgtgttccaatgggtctttgcagtgtagaatatgcatctaa

SEQ ID NO: 32451 - RNA, 1698 nt, synthetic construct
  misc_feature 1..1698: note = hemagglutinin__InfluenzaA__ABV30151
  source 1..1698: mol_type = other RNA
atgaaagtaaaactacttgttctgttatgtacatttacagctacatatgcagacacaatatgtataggctaccatgccaacaactcgaccgacactgttgacacagtacttgagaagaatgtgacagtgacacactctgtcaacctacttgaggacagtcacaatggaaaactatgtctactaaaaggaatagccccactacaattgggtaattgcagcgttgccggatggatcttaggaaacccagaatgcgaattactgatttccaaggaatcatggtcctacattgtagaaacaccaaatcctgagaatggaacatgttacccagggtatttcgccgactatgaggagctgagggagcaattgagttcagtatcttcatttgagaggttcgaaatattccccaaagagagctcatggcccaaccacaccgtaaccggagtatcagcatcatgctcccatagtgggaaaagcagtttttacagaaatttgctatggctgacggggaagaatggtttgtatccaaacctgagcaagtcctatgcaaacaacaaagagaaagaagtccttgtactgtggggtgttcatcacccgcctaacataggggaccaaagggccctctatcatacagaaaatgcttatgtctctgtagtgtcttcacattatagcagaagattcaccccagaaatagccaaaagacccaaggtgagagatcaggaaggaagaatcaactactactggactctgctggaacccggggatacaataatatttgaggcaaatggaaatctaatagcgccaaggtttgctttcgcactgagtagaggctttggatcaggaatcatcacctcaaatgcaccaatgggtgaatgtgatgcgaagtgtcaaacacctcagggagctataaacagtagtcttcctttccagaatgtacatccagtcacaataggggagtgtccaaagtatgtcaggagtgcaaaattaagaatggttacaggactaaggaacatcccatccattcaatcccgaggtttgtttggagccattgccggtttcattgaaggggggtggactggaatggtagatggttggtatggttatcaccatcagaatgagcaaggatctgggtatgctgcagatcaaaaaagcacacaaaatgccattaacgggattacaaacaaggtgaattctgtaattgagaaaatgaacactcaattcacagctgtgggcaaagaattcaacaaattggaaagaaggatggaaaacttaaataaaaaggttgatgatgggtttctagacatttggacatataacgcagaattgttggttctactggaaaatgaaaggactttggacttccatgactccaacgtgaagaatctgtatgagaaagtaaaaagccaattaaagaataatgccaaagaaataggaaacgggtgttttgaattctatcacaagtgtaacgatgaatgcatggagagtgtgaaaaatggaacttatgactatccaaaatattccgaagaatcaaagttgaacagggagaaaattgatggagtgaaattggaatcaatgggagtctatcagattctggcgatctactcaacagtcgccagttccctggttcttttggtctccctgggggcaatcagcttctggatgtgttccaatgggtctttgcagtgtagaatatgcatctaa

SEQ ID NO: 32452 - RNA, 1698 nt, synthetic construct
  misc_feature 1..1698: note = hemagglutinin__InfluenzaA__ABV30162
  source 1..1698: mol_type = other RNA
atgaaagtaaaactactggttctgttatgtacatttacagctacatatgcagacacaatatgtataggctaccatgccaacaactcgaccgacactgttgacacagtacttgagaagaatgtgacagtgacacactctgtcaacctacttgaggacagtcacaatggaaaactatgtctactaaaaggaatagccccactacaattgggtaattgcagcgttgccggatggatcttaggaaacccagaatgcgaattactgatttccagggaatcatggtcctacattgtagagacaccaaatcctgagaatggaacatgttacccagggtatttcgccgactatgaggagctgagagagcaattgagttcagtatcttcatttgagaggttcgaaatattccccaaagagagctcatggcccaaccacaccgtaaccggagtatcagcatcatgctcccataacgggaaaagcagtttttacagaaatttgctatggctgacggggaagaatggtttgtatccaaacctgagcaagtcctatgcaaacaacaaagagaaagaagtccttgtactgtggggtgttcatcacccgcctaacataggggaccaaagggccctctatcatacagaaaatgcttatgtatctgtagtgtcttcacattatagcagaagattcaccccagaaatagccaaaagacccaaggtgagagatcaggaaggaagaatcaactactactggactctgcttgaacccggggatacaataatatttgaggcaaatggaaatctaatagcgccaaggtttgctttcgcactgagtagaggctttggatcaggaatcatcacctcaaatgcaccaatggatgaatgtgatgcgaaatgtcaaacacctcagggagctataaacagcagtcttcctttccagaatgtacacccagtcacaataggagagtgtccaaagtatgtcaggagtacaaaattaagaatggttacaggactaaggaacatcccatccattcaatccagaggtttgtttggagccattgccggtttcattgaaggggggtggactggaatggtagatggttggtatggttatcaccatcagaatgagcaaggatctgggtatgctgcagatcaaaaaagcacacaaaatgccattaacgggattacaaacaaggtgaattctgtaattgagaaaatgaacactcaattcacagctgtgggcaaagaattcaacaaattggaaagaaggatggaaaacttaaataaaaaagttgatgatgggtttctagacatttggacatataacgcagaattgttggttctactggaaaatgaaaggactttggacttccatgactccaacgtgaagaatctgtatgagaaagtaaaaagccaattaaagaataatgccaaagaaataggaaacgggtgttttgaattctatcacaagtgtaacgatgaatgcatggagagtgtgaaaaatggaacttatgactatccaaaatattccgaagaatcaaagttgaacagggagaaaattgatggagtgaaattggaatcaatgggagtctatcagattttggcgatctactcaacagtcgccagttccctggttcttttggtctccctgggggcaatcagcttctggatgtgttccaatgggtctttgcagtgtagaatatgcatctaa

SEQ ID NO: 32453 - RNA, 1698 nt, synthetic construct; identical to SEQ ID NO: 32437
  misc_feature 1..1698: note = hemagglutinin__InfluenzaA__ABV30173
  source 1..1698: mol_type = other RNA

SEQ ID NO: 32454 - RNA, 1698 nt, synthetic construct
  misc_feature 1..1698: note = hemagglutinin__InfluenzaA__ABV30184
  source 1..1698: mol_type = other RNA
atgaaagtaaaactactggttctgttatgtacatttacagctacatatgcagacacaatatgtataggctaccatgccaacaactcgaccgacactgttgacacagtacttgagaagaatgtgacagtgacacactctgtcaacctacttgaggacagtcacaatggaaaactatgtctactaaaaggaatagccccactacaattgggtaattgcagcgttgccggatggatcttaggaaacccagaatgcgaattactgatttccaaggaatcatggtcctacattgtagagacaccaaatcctgagaatggaacatgttacccagggtatttcgccgactatgaggagctgagagagcaattgagttcagtatcttcatttgagaggttcgaaatattccccaaagagagctcatggcccaaccacaccgtaaccggagtatcagcatcatgctcccataacgggaaaagcagtttttacagaaatttgctgtggctgacggggaagaatggtttgtatccaaacctgagcaagtcctatgcaaacaacaaagagaaagaagtccttgtactgtggggtgttcatcacccgcctaacataggggaccaaagggccctctatcatacagaaaatgcttatgtctctgtagtgtcttcacattatagcagaagattcaccccagaaatagccaaaagacccaaggtgagagatcaggaaggaagaatcaactactactggactctgcttgaacccggggatacaataatatttgaggcaaatggaaatctaatagcgccaaggtttgctttcgcactgagtagaggctttggatcaggaatcatcacctcaaatgcaccaatggatgaatgtgatgcgaaatgtcaaacacctcagggagctataaacagcagtcttcctttccagaatgtacacccagtcacaataggagagtgtccaaagtatgtcaggagtacaaaattaagaatggttacaggactaaggaacatcccatccattcaatccagaggtttgtttggagccattgccggtttcattgaaggggggtggactggaatggtagatggatggtatggttaccaccatcagaatgagcaaggatctgggtatgctgctgatcaaaaaagcacacaaaatgccattaacgggattacaaacaaggtgaattctgtaattgagaaaatgaacactcaattcacagctgtgggcaaagaattcaacaaattggaaagaaggatggaaaacttaaataaaaaagttgatgatgggtttctagacatttggacatataacgcagaattgttggttctactggaaaatgaaaggactttggacttccatgactccaacgtgaagaatctgtatgagaaagtaaaaagccaattaaagaataatgccaaagaaataggaaacgggtgttttgaattctatcacaagtgtaatgatgaatgcatggagagtgtgaaaaatggaacttatgactatccaaaatattccgaagaatcaaagttgaacagggagaaaattgatggagtgaaattggaatcaatgggagtctatcagattttggcgatctactcaacagtcgccagttccctggttcttttggtctccctgggggcaatcagcttctggatgtgttccaatgggtctttgcagtgtagaatatgcatctaa

SEQ ID NO: 32455 - RNA, 1701 nt, synthetic construct
  misc_feature 1..1701: note = hemagglutinin__InfluenzaA__ABV30217
  source 1..1701: mol_type = other RNA
atgaagactatcattgctttgagctacattctatgtctggttttcgctcaaaaacttcctggaaatgacaacagcacggcaacgctgtgccttgggcaccatgcagtaccaaacggaacgatagtgaaaacaatcacgaatgaccaaattgaagttactaatgctactgagctggttcagagttcctcaacaggtgaaatatgcgacagtcctcatcagatccttgatggagaaaactgcacactaatagatgctctattgggagaccctcagtgtgatggcttccaaaataagaaatgggacctttttgttgaacgcagcaaagcctacagcaactgttacccttatgatgtgccggattatgcctcccttaggtcactagttgcctcatccggcacactggagtttaacaatgaaagcttcaattggactggagtcactcaaaacggaacaagctctgcttgcataaggagatctaataacagtttctttagtagattgaattggttgacccacttaaaattcaaatacccagcattgaacgtgactatgccaaacaatgaaaaatttgacaaattgtacatttggggggttcaccacccgggtacggacaatgaccaaatcttcctgtatgctcaagcatcaggaagaatcacagtctctaccaaaagaagccaacaaactgtaatcccgaatatcggatctagacccagagtaaggaatatccccagcagaataagcatctattggacaatagtaaaaccgggagacatacttttgattaacagcacagggaatctaattgctcctaggggttacttcaaaatacgaagtgggaaaagctcaataatgagatcagatgcacccattggtaaatgcaattctgaatgcatcactccaaatggaagcattcccaatgacaaaccattccaaaatgtaaacaggatcacatacggggcctgtcccagatatgttaagcaaaacactctgaaattggcaacagggatgcgaaatgtaccagagaaacaaactagaggcatatttggcgcaatcgcgggtttcatagaaaatggttgggagggaatggtggatggttggtacggtttcaggcatcaaaattctgagggaataggacaagcagcagatctcaaaagcactcaagcagcaatcgatcaaatcaatgggaagctgaataggttgatcgggaaaaccaacgagaaattccatcagattgaaaaagaattctcagaagtcgaagggaggattcaggaccttgagaaatatgttgaggacaccaaaatagatctctggtcatacaacgcggagcttcttgttgccctggagaaccaacatacaattgatctaactgactcagaaatgaacaaactgtttgaaaaaacaaagaagcaactgagggaaaatgctgaggatatgggcaatggttgtttcaaaatataccacaaatgtgacaatgcctgcataggatcaatcagaaatggaacttatgaccacgatgtatacagagatgaagcattaaacaaccggttccagatcaagggcgttgagctgaagtcaggatacaaagattggatcctatggatttcctttgccatatcatgttttttgctttgtgttgctttgttggggttcatcatgtgggcctgccaaaaaggcaacattaggtgcaacatttgcatttga

SEQ ID NO: 32456 - RNA, 1701 nt, synthetic construct
  misc_feature 1..1701: note = hemagglutinin__InfluenzaA__ABV30228
  source 1..1701: mol_type = other RNA
atgaagactatcattgctttgagctacattctatgtctggttttcgctcaaaaacttcctggaaatgacaacagcacggcaacgctgtgccttgggcaccatgcagtaccaaacggaacgatagtgaaaacaatcacgaatgaccaaattgaagttactaatgctactgagctggttcagagttcctcaacaggtgaaatatgcgacagtcctcatcagatccttgatggagaaaactgcacactaatagatgctctattgggagaccctcagtgtgatggcttccaaaataagaaatgggacctttttgttgaacgcagcaaagcctacagcaactgttacccttatgatgtgccggattatgcctcccttaggtcactagttgcctcatccggcacactggagtttaacaatgaaagcttcaattggactggagtcactcaaaacggaacaagctctgcttgcataaggagatctaataacagtttctttagtagattgaattggttgacccacttaaaattcaaatacccagcattgaacgtgactatgccaaacaatgaaaaatttgacaaattgtacatttggggggttcaccacccgggtacggacaatgaccaaatcttcctgtatgctcaagcatcaggaagaatcacagtctctaccaaaagaagccaacaaactgtaatcccgaatatcggatctagacccagagtaaggaatatccccagcagaataagcatctattggacaatagtaaaaccgggagacatacttttgattaacagcacagggaatctaattgctcctaggggttacttcaaaatacgaagtgggaaaagctcaataatgagatcagatgcacccattggcaaatgcaattctgaatgcatcactccaaatggaagcattcccaatgacaaaccattccaaaatgtaaacaggatcacatacggggcctgtcccagatatgttaagcaaaacactctgaaattggcaacagggatgcgaaatgtaccagagaaacaaactagaggcatatttggcgcaatcgcgggtttcatagaaaatggttgggagggaatggtggatggttggtacggtttcaggcatcaaaattctgagggaataggacaagcagcagatctcaaaagcactcaagcagcaatcgaccaaatcaatgggaagctgaataggttgatcgggaaaaccaacgagaaattccatcagattgaaaaagaattctcagaagtcgaagggaggattcaggaccttgagaaatatgttgaggacaccaaaatagatctctggtcatacaacgcggagcttcttgttgccctggagaaccaacatacaattgatctaactgactcagaaatgaacaaactgtttgaaaaaacaaagaagcaactgagggaaaatgctgaggatatgggcaatggttgtttcaaaatataccacaaatgtgacaatgcctgcataggatcaatcagaaatggaacttatgaccacgatgtatacagagatgaagcattaaacaaccggttccagatcaagggcgttgagctgaagtcaggatacaaagattggatcctatggatttcctttgccatatcatgttttttgctttgtgttgctttgttggggttcatcatgtgggcctgccaaaaaggcaacattaggtgcaacatttgcatttga

SEQ ID NO: 32457 - RNA, 1701 nt, synthetic construct
  misc_feature 1..1701: note = hemagglutinin__InfluenzaA__ABV30261
  source 1..1701: mol_type = other RNA
atgaagactatcattgctttgagctacattctatgtctggttttcgctcaaaaacttcccggaattgacaacagcacggcaacgctgtgccttgggcaccatgcagtaccaaacggaacgatagtgaaaacaatcacgaatgaccaagttgaagttactaatgctactgagctggttcagagttcctcaacaggtggaatatgcgacagtcctcatcagatccttgatggagaaaactgcacactaatagatgctctattgggagaccctcagtgtgatggcttccaaaataagaaatgggacctttttgttgaacgcagcaaagcctacagcaactgttacccttatgatgtgccggattatgcctcccttaggtcactagttgcctcatccggcacactggagtttaacaatgaaagcttcaattgggctggagtcactcaaaatggaacaagctctgcttgcaaaaggggatctaataacagtttctttagtagattgaattggttgacccactcaaaattcaaatacccagcattgaacgtgactatgccaaacaatgaagaatttgacaaattgtacatttggggggttcaccacccgggtacggacaatgaccaaatcttcctgtatgctcaagcatcaggaagaatcacagtctctaccaaaagaagccaacaaactgtaatcccgaatatcggatctagacccagagtaaggaatatccccagcagaataagcatctattggacaatagtaaaaccgggagacatacttttgattaacagcacagggaatctaattgctcctaggggttacttcaaaatacgaagtgggaaaagctcaataatgagatcagatgcacccattggcaaatgcaattctgaatgcatcactccaaatggaagcattcccaatgacaaaccatttcaaaatgtaaacaggatcacatatggggcctgtcccaggtatgttaagcaaaacactctgaaattggcaacagggatgcgaaatgtaccagagaaacaaactagaggcatatttggcgcaatcgcgggtttcatagaaaatggttgggagggaatggtggatggttggtacggtttcaggcatcaaaattctgagggaatgggacaagcagcagatctcaaaagcactcaagcagcaatcgatcaaatcaatgggaagctgaataggttgatcgggaaaaccaacgagaaattccaccagattgaaaaagaattctcagaagtagaagggagaattcaggacctcgagaaatatgttgaggacactaaaatagatctctggtcatacaacgcggagcttcttgttgccctggagaaccaacatacaattgatctaactgactcagaaatgaacaaactgtttgaaaagacaaagaagcaactgagggaaaatgctgaggatatgggcaatggttgtttcaaaatataccacaaatgtgacaatgcctgcataggatcaatcagaaatggaacttatgaccatgatgtatacagagctgaagcattaaacaaccggtttcagatcaagggcgttgagctgaagtcaggatacaaagattggatcctatggatttcctttgccatatcatgttttttgctttgtgttgctttgttggggttcatcatgtgggcctgccaaaaaggcaacattaggtgcaacatttgcatttga

SEQ ID NO: 32458 - RNA, 1701 nt, synthetic construct
  misc_feature 1..1701: note = hemagglutinin__InfluenzaA__ABV30272
  source 1..1701: mol_type = other RNA
atgaagactatcattgctttgagctacattctatgtctggttttcgctcaaaaacttcctggaaatgacaacagcacggcaacgctgtgccttgggcaccatgcagtaccaaacggaacgatagtgaaaacaatcacgaatgaccaaattgaagttactaatgctactgagctggttcagagttcctcaacaggtgaaatatgcgacagtcctcatcagatccttgatggagaaaactgcacactaatagatgctctattgggagaccctcagtgtgatggcttccaaaataagaaatgggacctttttgttgaacgcagcaaagcctacagcaactgttacccttatgatgtgccggattatgcctcccttaggtcactagttgcctcatccggcacactggagtttaacaatgaaagcttcaattggactggagtcactcaaaacggaacaagctctgcttgcataaggagatctaataacagtttctttagtaaattgaattggttgacccacttaaaattcaaatacccagcattgaacgtgactatgccaaacaatgaaaaatttgacaaattgtacatttggggggttcaccacccgggtacggacaatgaccaaatcttcctgtatgctcaagcatcaggaagaatcacagtctctaccaaaagaagccaacaaactgtaatcccgaatatcggatctagacccagagtaaggaatatccccagcagaataagcatctattggacaatagtaaaaccgggagacatacttttgattaacagcacagggaatctaattgctcctaggggttacttcaaaatacgaagtgggaaaagctcaataatgagatcagatgcacccattggcaaatgcaattctgaatgcatcactccaaatggaagcattcccaatgacaaaccattccaaaatgtaaacaggatcacatacggggcctgtcccagatatgttaagcaaaacactctgaaattggcaacagggatgcgaaatgtaccagagaaacaaactagaggcatatttggcgcaatcgcgggtttcatagaaaatggttgggagggaatggtggatggttggtacggtttcaggcatcaaaattctgagggaataggacaagcagcagatctcaaaagcactcaagcagcaatcgatcaaatcaatgggaagctgaataggttgatcgggaaaaccaacgagaaattccatcagattgaaaaagaattctcagaagtcgaagggaggattcaggaccttgagaaatatgttgaggacaccaaaatagatctctggtcatacaacgcggagcttcttgttgccctggagaaccaacatacaattgatctaactgactcagaaatgaacaaactgtttgaaaaaacaaagaagcaactgagggaaaatgctgaggatatgggcaatggttgtttcaaaatataccacaaatgtgacaatgcctgcataggatcaatcagaaatggaacttatgaccacgatgtatacagagatgaagcattaaacaaccggttccagatcaagggcgttgagctgaagtcaggatacaaagattggatcctatggatttcctttgccatatcatgttttttgctttgtgttgctttgttggggttcatcatgtgggcctgccaaaaaggcaacattaggtgcaacatttgcatttga

SEQ ID NO: 32459 - RNA, 1698 nt, synthetic construct
  misc_feature 1..1698: note = hemagglutinin__InfluenzaA__ABV30283
  source 1..1698: mol_type = other RNA
atgaaagtaaaactactggttctgttatgtacatttacagctacatatgcagacacaatatgtataggctaccatgccaacaactcgaccgacactgttgacacagtacttgagaagaatgtgacagtgacacactctgtcaacctacttgaggacagtcacaatggaaaactatgtctactaaaaggaatagccccactacaattgggtaattgcagcgttgccggatggatcttaggaaacccagaatgcgaattactgatttccaaggaatcatggtcctacattgtagagacaccaaatcctgagaatggaacatgttacccagggaatttcgccgactatgaggagttgagagagcaattgagttcagtatcttcatttgagaggttcgaaatattccccaaagagagctcatggcccaaccacaccgtaaccggagtatcagcatcatgctcccataacgggaaaagcagtttttacagaaatttgctatggctgacggggaagaatggtttgtatccaaacctgagcaagtcctatgcaaacaacaaagagaaagaagtccttgtactgtggggtgttcatcacccgcctaacataggggaccaaagggccctctatcatacagaaaatgcttatgtctctgtagtgtcttcacattatagcagaagattcaccccagaaatagccaaaagacccaaggtgagagatcaggaaggaagaatcaactactactggactctgcttgaacccggggatacaataatatttgaggcaaatggaaatctaatagcgccaaggtttgctttcgcactgagtagaggctttggatcaggaatcatcacctcaaatgcaccaatggatgaatgtgatgcgaaatgtcaaacacctcagggagctataaacagcagccttcctttccagaatgtacacccagtcacaataggagagtgtccaaagtatgtcaggagtgcaaaattaagaatggttacagggctaaggaacatcccatccattcaatccagaggtttgtttggagccattgccggtttcattgaaggggggtggactggaatggtagatggttggtatggttatcaccatcagaatgagcaaggatctgggtatgctgcagatcaaaaaagcacacaaaatgccattgacgggattacaaacaaggtgaattctgtaattgagaaaatgaacactcaattcacagctgtgggcaaagaattcaacaaattggaaagaaggatggaaaacttaaataaaaaagttgatgatgggtttctagacatttggacatataacgcagaattgttggttctactggaaaatgaaaggactttggacttccatgactccaacgtgaagaatctgtatgagaaagtaaaaagccaattaaagaataatgccaaagaaataggaaacgggtgttttgaattctatcacaaatgtaacgatgaatgcatggagagtgtgaaaaatggaacttatgactatccaaaatattccgaagaatcaaagttgaacagggagaaaattgatggagtaaaattggaatcaatgggagtctatcagattttggcgatctactcaacagtcgccagttccctggttcttttggtctccctgggggcaatcagcttctggatgtgttccaatgggtctttgcagtgtagaatatgcatctaa

SEQ ID NO: 32460 - RNA, 1698 nt, synthetic construct
  misc_feature 1..1698: note = hemagglutinin__InfluenzaA__ABV30294
  source 1..1698: mol_type = other RNA
atgaaagtgaaactactggttctgttatgtacatttacagctacatatgcagacacaatatgtataggctaccatgccaacaactcgaccgacactgttgacacagtacttgagaagaatgtgacagtgacacactctgtcaacctacttgaggaccgtcacaatggaaaactatgtctactaaaaggaatagccccactacaattgggtaattgcagcgttgccggatggatcttaggaaacccagaatgcgaattactgatttccaaggaatcatggtcctacattgtagaaacaccaaatcctgagaatggaacatgttacccagggtatttcgccgactatgaggagctgagggagcaattgagttcagtatcttcatttgagaggttcgaaatattccccaaagagagctcatggcccaatcacaccgtaaccggagtatcagcatcatgctcccataacgggaaaagcagtttttacagaaatttgctatggctgacgggaaagaatggtttgtacccaaacctgagcagatcctatgcaaacaacaaagagaaagaagtccttgtactgtggggtgttcatcacccgcctaacataggggaccaaagggccctctatcatacagaaaatgcttatgtctctgtagtgtcttcacattatagcagaagattcaccccagaaatagccaaaagacccaaggtgagagatcaggagggaagaatcaattactactggactctactggaacccggggatacaataatatttgaggcaaatgggaatctaatagcgccaaggtttgctttcgcactgagtagaggctttggatcaggaatcatcacctcaaatgcaccaatggatgaatgtgatgcgaagtgtcaaacacctcagggagctataaacagcagtcttcctttccagaatgtacacccagtcacaataggagagtgtccaaagtatgtcaggagtgcaaaattaagaatggttacaggactaaggaacatcccatccattcaatccagaggtttgtttggagccattgccggtttcattgaaggggggtggactggaatggtagatggttggtatggttatcaccaccagaatgagcaaggatctgggtatgctgcagatcaaaaaagcacacaaaatgccattaacgggattacaaacaaggtgaattctgtgattgagaaaatgaacactcaattcacagctgtgggcaaagaattcaacaaattggaaagaagaatggaaaacttaaataaaaaagttgatgatgggtttctagacatttggacgtataacgcagaattgttggttctactggaaaatgaaaggactttggacttccatgactccaacgtgaagaatctgtatgagaaagtaaaaagccaattaaagaataatgccaaagaaataggaaacgggtgttttgaattctatcacaagtgtaacgatgaatgcatggagagtgtgaaaaatggaacttatgactatccaaaatattccgaagaatcaaagttaaacagggagaaaattgatggagtgaaattggaatcaatgggagtctatcagattctggcgatctactcaacagtcgccagttccctggttcttttggtctccctgggggcaatcagcttctggatgtgttccaatgggtctttgcagtgtagaatatgcatctaa

SEQ ID NO: 32461 - RNA, 1698 nt, synthetic construct
  misc_feature 1..1698: note = hemagglutinin__InfluenzaA__ABV30305
  source 1..1698: mol_type = other RNA
atgaaagtaaaactactggttctgttatgtacatttacagctacatatgcagacacaatatgtataggctaccatgccaacaactcgaccgacactgttgacacagtacttgagaagaatgtgacagtgacacactctgtcaacctacttgaggacagtcacaatggaaaactatgtctactaaaaggaatagccccactacaattgggtaattgcagcgttgccggatggatcttaggaaacccagaatgcgaattactgatttccaaggaatcatggtcctacattgtagagacaccaaatcctgagaatggaacatgttacccagggtatttcgccgactatgaggagctgagagagcaattgagttcagtatcttcatttgagaggttcgaaatattccccaaagagagctcatggcccaaccacaccgtaaccggaggatcagcatcatgctcccataacgggaaaagcagtttttacagaaatttgctatggctgacggggaagaatggtttgtatccaaacctgagcaagtcctatgcaaacaacaaagagaaagaagtccttgtactgtggggtgttcatcacccgcctaacataggggaccaaagggccctctatcatacagaaaatgcttatgtctctgtagtgtcttcacattatagcagaagattcaccccagaaatagccaaaagacccaaggtgagagatcaggaaggaagaatcaactactactggactctgcttgaacccggggatacaataatatttgaggcaaatggaaatctaatagcgccaaggtttgctttcgcactgagtagaggctttggatcaggaatcatcacctcaaatgcaccaatggatgaatgtgatgcgaaatgtcaaacacctcagggagctataaacagcagtcttcctttccagaatgtacacccagtcacaataggagagtgtccaaagtatgtcaggagtacaaaattaagaatggttacaggactaaggaacatcccatccattcaatccagaggtttgtttggagccattgccggtttcattgaaggggggtggactggaatggtagatggatggtatggttaccaccatcagaatgagcaaggatctgggtatgctgctgatcaaaaaagcacacaaaatgccattaacgggattacaaacaaggtgaattctgtaattgagaaaatgaacactcaattcacagctgtgggcaaagaattcaacaaattggaaagaaggatggaaaacttaaataaaaaagttgatgatgggtttctagacatttggacatataacgcagaattgttggttctactggaaaatgaaaggactttggacttccatgactccaacgtgaagaatctgtatgagaaagtaaaaagccaattaaagaataatgccaaagaaataggaaacgggtgttttgaattctatcacaagtgtaacaatgaatgcatggagagtgtgaaaaatggaacttatgactatccaaaatattccgaagaatcaaagttgaacagggagaaaattgatggagtgaaattggaatcaatgggagtctatcagattttggcgatctactcaacagtcgccagttccctggttcttttggtctccctgggggcaatcagcttctggatgtgttccaatgggtctttgcagtgtagaatatgcatctaa

SEQ ID NO: 32462 - RNA, 1698 nt, synthetic construct; identical to SEQ ID NO: 32430
  misc_feature 1..1698: note = hemagglutinin__InfluenzaA__ABV30316
  source 1..1698: mol_type = other RNA

SEQ ID NO: 32463 - RNA, 1698 nt, synthetic construct
  misc_feature 1..1698: note = hemagglutinin__InfluenzaA__ABV30327
  source 1..1698: mol_type = other RNA
atgaaagtgaaactactggttctgttatgtacatttacagctacatatgcagacacaatatgtataggctaccatgccaacaactcgaccgacactgttgacacagtacttgagaagaatgtgacagtgacacactctgtcaacctacttgaggaccgtcacaatggaaaactatgtctactaaaaggaatagccccactacaattgggtaattgcagcgttgccggatggatcttaggaaacccagaatgcgaattactgatttccaaggaatcatggtcctacattgtagaaacaccaaatcctgagaatggaacatgttacccagggtatttcgccgactatgaggagctgagggagcaattgagttcagtatcttcatttgagaggttcgaaatattccccaaagagagctcatggcccaatcacaccgtaaccggagtatcagcatcatgctcccataacgggaaaagcagtttttacagaaatttgctatggctgacgggaaagaatggtttgtacccaaacctgagcagatcctatgcaaacaacaaagagaaagaagtccttgtactgtggggtgttcatcacccgcctaacataggggaccaaagggccctctatcatacagaaaatgcttatgtctctgtagtgtcttcacattatagcagaagattcaccccagaaatagccaaaagacccaaggtgagagatcaggaaggaagaatcaattactactggactctactggaacccggggatacaataatatttgaggcaaatgggaatctaatagcgccaaggtttgctttcgcactgagtagaggctttggatcaggaatcatcacctcaaatgcaccaatggatgaatgtgatgcgaagtgtcaaacacctcagggagctataaacagcagtcttcctttccagaatgtacacccagtcacaataggagagtgtccaaagtatgtcaggagtgcaaaattaagaatggttacaggactaaggaacatcccatccattcaatccagaggtttgtttggagccattgccggtttcattgaaggggggtggactggaatggtagatggttggtatggttatcaccaccagaatgagcaaggatctgggtatgctgcagatcaaaaaagcacacaaaatgccattaacgggattacaaacaaggtgaattctgtgattgagaaaatgaacactcaattcacagctgtgggcaaagaattcaacaaattggaaagaagaatggaaaacttaaataaaaaagttgatgatgggtttctagacatttggacgtataacgcagaattgttggttctactggaaaatgaaaggactttggacttccatgactccaacgtgaagaatctgtatgagaaagtaaaaagccaattaaagaataatgccaaagaaataggaaacgggtgttttgaattctatcacaagtgtaacgatgaatgcatggagagtgtgaaaaatggaacttatgactatccaaaatattccgaagaatcaaagttaaacagggagaaaattgatggagtgaaattggaatcaatgggagtctatcagattctggcgatctactcaacagtcgccagttccctggttcttttggtctccctgggggcaatcagcttctggatgtgttccaatgggtctttgcagtgtagaatatgcatctaa

SEQ ID NO: 32464 - RNA, 1698 nt, synthetic construct
  misc_feature 1..1698: note = hemagglutinin__InfluenzaA__ABV30338
  source 1..1698: mol_type = other RNA
atgaaagtaaaactactgattctgttatgtacatttacagctacatatgcagacacaatatgtataggctaccatgccaacaactcgaccgacactgttgacacagtacttgagaagaatgtgacagtgacacactctgtcaacctacttgaggacagtcacaatggaaaactatgtctactaaaaggaatagccccactacaattgggtaattgcagcgttgccggatggatcttaggaaacccagaatgcgaattactgatttccaaggaatcatggtcctacattgtagagacaccaaatcctgagaatggaacatgttacccagggtatttcgccgactatgaggagctgagagagcaattgagttcagtatcttcatttgagaggttcgaaatattccccaaagagagctcatggcccaaccacaccgtaaccggagtatcagcatcatgctcccataacgggaaaagcagtttttacagaaatttgctatggctgacggggaagaatggtttgtatccaaacttgagcaagtcctatgcaaacaacaaagagaaagaagtccttgtactgtggggtgttcatcacccgcctaacataggggaccaaagggccctctatcatacagaaaatgcttatgtctctgtagtgtcttcacattatagcagaagattcaccccagaaatagccaaaagacccaaggtgagagatcaggaaggaagaatcaactactactggactctgcttgaacccggggatacaataatatttgaggcaaatggaaatctaatagcgccaaggtttgctttcgcactgagtagaggctttggatcaggaatcatcacctcaaatgcaccaatggatgaatgtgatgcgaaatgtcaaacacctcagggagctataaacagcagtcttcctttccagaatgtacacccagtcacaataggagagtgtccaaagtatgtcaggagtacaaaattaagaatggttacaggactaaggaacatcccatccattcaatccagaggtttatttggagccattgccggtttcattgaaggggggtggactggaatggtagatggttggtatggttatcaccatcagaatgagcaaggatctgggtatgctgcagatcaaaaaagcacacaaaatgccattaacgggattacaaacaaggtgaattctgtaattgagaaaatgaacactcaattcacagctgtgggcaaagaattcaacaaattggaaagaaggatggaaaacttaaataaaaaagttgatgatgggtttctagacatttggacatataacgcagaattgttggttctactggaaaatgaaaggactttggacttccatgactccaacgtgaagaatctgtatgagaaagtaaaaagccaattaaagaataatgccaaagaaataggaaacgggtgttttgaattctatcacaagtgtaacgatgaatgcatggagagtgtgaaaaatggaacttatgactatccaaaatattccgaagaatcaaagttgaacagggagaaaattgatggagtgaaattggaatcaatgggagtctatcagattttggcgatctactcaacagtcgccagttccctggttcttttggtctccctgggggcaatcagcttctggatgtgttccaatgggtctttgcagtgtagaatatgcatctaa

SEQ ID NO: 32465 - RNA, 1698 nt, synthetic construct
  misc_feature 1..1698: note = hemagglutinin__InfluenzaA__ABV30349
  source 1..1698: mol_type = other RNA
atgaaagtaaaactactggttctgttatgtacatttacagctacatatgcagacacaatatgtataggctaccatgccaacaactcgaccgacactgttgacacagtacttgagaagaatgtgacagtgacacactctgtcaacctacttgaggacagtcacaatggaaaactatgtctactaaaaggaatagccccactacaattgggtaattgcagcgttgccggatggatcttaggaaacccagaatgcgaattactgatttccaaggaatcatggtcctacattgtagagacaccaaatcctgagaatggaacatgttacccagggtatttcgccgactatgaggagctgagagagcaattgagttcagtatcttcatttgagaggttcgaaatattccccaaagagagctcatggcccaaccacaccgtaaccggagtatcagcatcatgctcccataacgggaaaagcagtttttacagaaatttgctatggctgacggggaagaatggtttgtatccaaacctgagcaagtcctatgcaaacaacaaagagaaagaagtccttgtactgtggggtgttcatcacccgcctaacataggggaccaaagggccctctatcatacagaaaatgcttatgtctctgtagtgtcttcacattatagcagaagattcaccccagaaatagccaaaagacccaaggtgagagatcaggaaggaagaatcaactactactggactctgcttgaacccggggatacaataatatttgaggcaaatggaaatctaatagcgccaaggtttgctttcgcactgagtagaggctttggatcaggaatcatcacctcaaatgcaccaatggatgaatgtgatgcgaaatgtcaaacacctcagggagctataaacagcagtcttcctttccagaatgtacacccagtcacaataggagagtgtccaaagtatgtcaggagtacaaaattaagaatggttacaggactaaggaacatcccatccattcaatccagaggtttgtttggagccattgccggtttcattgaaggggggtggactggaatggtagatggttggtatggttatcaccatcagaatgagcaaggatctgggtatgctgctgatcaaaaaagcacacaaaatgccattaacgggattacaaacaaggtgaattctgtaattgagaaaatgaacactcaattcacagctgtgggcaaagaattcaacaaattggaaagaaggatggaaaacttaaataaaaaagttgatgatgggtttctagacatttggacatataacgcagaattgttggttctactggaaaatgaaaggactttggacttccatgactccaacgtgaagaatctgtatgagaaagtaaaaagccaattaaagaataatgccaaagaaataggaaacgggtgttttgaattctatcacaagtgtaacgatgaatgcatggagagtgtgaaaaatggaacttatgactatccaaaatattccgaagaatcaaagttgaacagggagaaaattgatggagtgaaattggaatcaatgggagtctatcagattttggcgatctactcaacagtcgccagttccctggttcttttggtctccctgggggcaatcagcttctggatgtgttccaatgggtctttgcagtgtagaatatgcatctaa

SEQ ID NO: 32466 - RNA, 1698 nt, synthetic construct
  misc_feature 1..1698: note = hemagglutinin__InfluenzaA__ABV30360
  source 1..1698: mol_type = other RNA
atgaaagtaaaactactggttctgttatgtacatttacagctacatatgcagacacaatatgtataggctaccatgccaacaactcgaccgacactgttgacacagtacttgagaagaatgtgacagtgacacactctgtcaacctacttgaggacagtcacaatggaaaactatgtctactaaaaggaatagccccactacaattgggtaattgcagcgttgccggatggatcttaggaaacccagaatgcgaattactgatttccaaggaatcatggtcctacattgtagagacaccaaatcctgagaatggaacatgttacccagggaatttcgccgactatgaggagttgagagagcaattgagttcagtatcttcatttgagaggttcgaaatattccccaaagagagctcatggcccaaccacaccgtaaccggagtatcagcatcatgctcccataacgggaaaagcagtttttacagaaatttgctatggctgacggggaagaatggtttgtatccaaacctgagcaagtcctatgcaaacaacaaagagaaagaagtccttgtactgtggggtgttcatcacccgcctaacataggggaccaaagggccctctatcatacagaaaatgcttatgtctctgtagtgtcttcacattatagcagaagattcaccccagaaatagccaaaagacccaaggtgagagatcaggaaggaagaatcaactactactggactctgcttgaacccggggatacaataatatttgaggcaaatggaaatctaatagcgccaaggtttgctttcgcactgagtagaggctttggatcaggaatcatcacctcaaatgcaccaatggatgaatgtgatgcgaaatgtcaaacacctcagggagctataaacagcagccttcctttccagaatgtacacccagtcacaataggagagtgtccaaagtatgtcaggagtgcaaaattaagaatggttacagggctaaggaacatcccatccattcaatccagaggtttgtttggagccattgccggtttcattgaaggggggtggactggaatggtagatggttggtatggttatcaccatcagaatgagcaaggatctgggtatgctgcagatcaaaaaagcacacaaaatgccattgacgggattacaaacaaggtgaattctgtaattgagaaaatgaacactcaattcacagctgtgggcaaagaattcaacaaattggaaagaaggatggaaaacttaaataaaaaagttgatgatgggtttctagacatttggacatataacgcagaattgttggttctactggaaaatgaaaggactttggacttccatgactccaacgtgaagaatctgtatgagaaagtaaaaagccaattaaagaataatgccaaagaaataggaaacgggtgttttgaattctatcacaaatgtaacgatgaatgcatggagagtgtgaaaaatggaacttatgactatccaaaatattccgaagaatcaaagttgaacagggagaaaattgatggaataaaattggaatcaatgggagtctatcagattttggcgatctactcaacagtcgccagttccctggttcttttggtctccctgggggcaatcagcttctggatgtgttccaatgggtctttgcagtgtagaatatgcatctaa

SEQ ID NO: 32467 - RNA, 1698 nt, synthetic construct; identical to SEQ ID NO: 32418
  misc_feature 1..1698: note = hemagglutinin__InfluenzaA__ABV30371
  source 1..1698: mol_type = other RNA

SEQ ID NO: 32468 - RNA, 1701 nt, synthetic construct
  misc_feature 1..1701: note = hemagglutinin__InfluenzaA__ABV30382
  source 1..1701: mol_type = other RNA
atgaagactatcattgctttgagctacattctatgtctggttttcgctcaaaaacttcccggaattgacaacagcacggcaacgctgtgccttgggcaccatgcagtaccaaacggaacgatagtgaaaacaatcacgaatgaccaaattgaagttactaatgctactgagctggttcagagttcctcaacaggtggaatatgcgacagtcctcatcagatccttgatggagaaaactgcacactaatagatgctctattgggagaccctcagtgtgatggcttccaaaataagaaatgggacctttttgttgaacgcagcaaagcctacagcaactgttacccttatgatgtgccggattatgcctcccttaggtcactagttgcctcatccggcacactggagtttaacaatgaaagcttcaattggactggagtcactcaaaatggaacaagctctgcttgcaaaaggggatctaataacagtttctttagtagattgaattggttgacccactcaaaattcaaatacccagcattgaacgtgactatgccaaacaatgaagaatttgacaaattgtacatttggggggttcaccacccgggtacggacaatgaccaaatcttcctgtatgctcaagcatcaggaagaatcacagtctctaccaaaagaagccaacaaactgtaatcccgaatatcggatctagacccagagtaaggaatatccccagcagaataagcatctattggacaatagtaaaaccgggagacatacttttgattaacagcacagggaatctaattgctcctaggggttacttcaaaatacgaagtgggaaaagctcaataatgagatcagatgcacccattggcaaatgcaattctgaatgcatcactccaaatggaagcattcccaatgacaaaccatttcaaaatgtaaacaggatcacatacggggcctgtcccagatatgttaagcaaaacactctgaaattggcaacagggatgcgaaatgtaccagagaaacaaactagaggcatatttggcgcaatcgcgggtttcatagaaaatggttgggagggaatggtggatggttggtacggtttcaggcatcaaaattctgagggaataggacaagcagcagatctcaaaagcactcaagcagcaatcgatcaaatcaatgggaagctgaatagattgatcgggaaaaccaacgagaaattccaccagattgaaaaagaattctcagaagtagaagggagaattcaggacctcgagaaatatgttgaggacactaaaatagatctctggtcatacaacgcggagcttcttgttgccctggagaaccaacatacaattgatctaactgactcagaaatgaacaaactgtttgaaaagacaaagaagcaactgagggaaaatgctgaggatatgggcaatggttgtttcaaaatataccacaaatgtgacaatgcctgcataggatcaatcagaaatggaacttatgaccatgatgtatacagagatgaagcattaaacaatcggtttcagatcaagggcgttgagctgaagtcaggatacaaagattggatcctatggatttcctttgccatatcatgttttttgctttgtgttgctttgttggggttcatcatgtgggcctgccaaaaaggcaacattaggtgcaacatttgcatttga

SEQ ID NO: 32469 - RNA, 1701 nt, synthetic construct
  misc_feature 1..1701: note = hemagglutinin__InfluenzaA__ABV30393
  source 1..1701: mol_type = other RNA
atgaagactatcattgctttgagctacattctatgtctggttttcgctcaaaaacttcccggaaatgacaacagcacggcaacgctgtgccttgggcaccatgcagtaccaaacggaacgatagtgaaaacaatcacgaatgaccaaattgaagttactaatgctactgagctggttcagagttcctcaacaggtggaatatgcgacagtccccatcagatccttgatggagaaaactgcactctaatagatgctctattgggagaccctcagtgtgatggcttccaaaataagaaatgggacctttttgttgaacgcagcaaagcctacagcaactgttacccttatgatgtgccggattatgcctcccttaggtcactagttgcctcatccggcacactggagtttaacaatgaaagcttcaattggactggagtcactcaaaatggaacaagctctgcttgcaaaaggagatctaataacagtttctttagtagattgaattggttgacccacttaaaattcaaatacccagcattgaacgtgactatgccaaacaatgaaaaatttgacaaattgtacatttggggggttcaccacccgggtacggacaatgaccaaatcttcctgtatgctcaagcatcaggaagaatcacagtctctaccaaaagaagccaacaaactgtaatcccgaatatcggatctagacccagggtaaggaatatccccagcagaataagcatctattggacaatagtaaaaccgggagacatacttttgattaacagcacagggaatctaattgctcctaggggttacttcaaaatacgaagtgggaaaagctcaataatgagatcagatgcacccattggcaaatgcaattctgaatgcatcactccaaatggaagcattcccaatgacaaaccatttcaaaatgtaaacaggatcacatatggggcctgtcccagatatgttaagcaaaacactctgaaattggcaacagggatgcgaaatgtaccagagaaacaaactagaggcatatttggcgcaatcgcgggtttcatagaaaatggttgggagggaatggtggatggttggtacggtttcaggcatcaaaattctgagggaataggacaagcagcagatctcaaaagcactcaagcagcaatcaatcaaatcaatgggaagctgaataggttgatcgggaaaaccaacgagaaattccatcagattgaaaaggaattctcagaagtagaagggagaattcaggacctcgagaaatatgttgaggacactaaaatagatctctggtcatacaacgcggagcttcttgttgccctggagaaccaacatacaattgatctaactgactcagaaatgaacaaactgtttgaaagaacaaagaagcaactgagggaaaatgctgaggatatgggcaatggttgtttcaaaatataccacaaatgtgacaatgcctgcataggatcaatcagaaatggaacttatgaccatgatgtatacagagatgaagcattaaacaaccggttccagatcaaaggcgttgagctgaagtcaggatacaaagattggatcctatggatttcctttgccatatcatgttttttgctttgtgttgctttgttggggttcatcatgtgggcctgccaaaaaggcaacattaggtgcaacatttgcatttga

SEQ ID NO: 32470 - RNA, 1701 nt, synthetic construct
  misc_feature 1..1701: note = hemagglutinin__InfluenzaA__ABV30404
  source 1..1701: mol_type = other RNA
atgaagactatcattgctttgagctacattctatgtctggttttcgctcaaaaacttcctggaaatgacaacagcacggcaacgctgtgccttgggcaccatgcagtaccaaacggaacgatagtgaaaacaatcacgaatgaccaaattgaagttactaatgctactgagctggttcagagttcctcaacaggtgaaatatgcgacagtcctcatcagatccttgatggagaaaactgcacactaatagatgctctattgggagaccctcagtgtgatggcttccaaaataagaaatgggacctttttgttgaacgcagcaaagcctacagcaaatgttacccttatgatgtgccggattatgcctcccttaggtcactagttgcctcatccggcacactggagtttaacaatgaaagcttcaattggactggagtcactcaaaacggaacaagctctgcttgcataaggagatctaataacagtttctttagtagattgaattggttgacccacttaaaattcaaatatccagcattgaacgtgactatgccaaacaatgaaaaatttgacaaattgtacatttggggggttcaccacccgggtacggacaatgaccaaatcttcctgtatgctcaagcatcaggaagaatcacagtctctaccaaaagaagccaacaaactgtaatcccgaatatcggatctagacccagagtaaggaatatccccagcagaataagcatctattggacaatagtaaaaccgggagacatacttttgattaacagcacagggaatctaattgctcctaggggttacttcaaaatacgaagtgggaaaagctcaataatgagatcagatgcacccattggcaaatgcaattctgaatgcatcactccaaatggaagcattcccaatgacaaaccattccaaaatgtaaacaggatcacatacggggcctgtcccagatatgttaagcaaaacactctgaaattggcaacagggatgcgaaatgtaccagagaaacaaactagaggcatatttggcgcaatcgcgggtttcatagaaaatggttgggagggaatggtggatggttggtacggtttcaggcatcaaaattctgagggaataggacaagcagcagatctcaaaagcactcaagcagcaatcgatcaaatcaatgggaagctgaataggttgatcgggaaaaccaacgagaaattccatcagattgaaaaagaattctcagaagtcgaagggagaattcaggaccttgagaaatatgttgaggacaccaaaatagatctctggtcatacaacgcggatcttcttgttgccctggagaaccaacatacaattgatctaactgactcagaaatgaacaaactgtttgaaaaaacaaagaagcaactgagggaaaatgctgaggatatgggcaatggttgtttcaaaatataccacaaatgtgacaatgcctgcataggatcaatcagaaatggaacttatgaccacgatgtatacagagatgaagcattaaacaaccggttccagatcaagggcgttgagctgaagtcaggatacaaagattggatcctatggatttcctttgccatatcatgttttttgctttgtgttgctttgttggggttcatcatgtgggcctgccaaaaaggcaacattaggtgcaacatttgcatttga

SEQ ID NO: 32471 - RNA, 1701 nt, synthetic construct
  misc_feature 1..1701: note = hemagglutinin__InfluenzaA__ABV30415
  source 1..1701: mol_type = other RNA
atgaagactatcattgctttgagctacattctatgtctggttttcgctcaaaaacttcccggaattgacaacagcacggcaacgctgtgccttgggcaccatgcagtaccaaacggaacgatagtgaaaacaatcacgaatgaccaaattgaagttactaatgctactgagctggttcagagttcctcaacaggtggaatatgcgacagtcctcatcagatccttgatggagaaaactgcacactaatagatgctctattgggagaccctcagtgtgatggcttccaaaataagaaatgggacctttttgttgaacgcagcaaagcctacagcaactgttacccttatgatgtgccggattatgcctcccttaggtcactagttgcctcatccggcacactggagtttaacaatgaaagcttcaattgggctggagtcactcaaaatggaacaagctctgcttgcaaaaggggatctaataacagtttctttagtagattgaattggttgacccactcaaaattcaaatacccagcattgaacgtgactatgccaaacaatgaagaatttgacaaattgtacatttggggagttcaccacccgggtacggacaatgaccaaatcttcctgtatgctcaagcatcaggaagaatcacagtctctaccaaaagaagccaacaaactgtaatcccgaatatcggatctagacccagagtaaggaatatccccagcagaataagcatctattggacaatagtaaaaccgggagacatacttttgattaacagcacagggaatctaattgctcctaggggttacttcaaaatacgaagtgggaaaagctcaataatgagatcagatgcacccattggcaaatgcaattctgaatgcatcactccaaatggaagcattcccaatgacaaaccatttcaaaatgtaaacaggatcacatacggggcctgtcccagatatgttaagcaaaacactctgaaattggcaacagggatgcgaaatgtaccagagaaacaaactagaggcatatttggtgcaatcgcgggtttcatagaaaatggttgggagggaatggtggatggttggtacggtttcaggcatcaaaattctgagggaataggacaagcagcagatctcaaaagcactcaagcagcaatcgatcaaatcaatgggaagctgaataggttgatcgggaaaaccaacgagaaattccaccaaattgaaaaagaattctcagaagtagaagggagaattcaggacctcgagaaatatgttgaggacactaaaatagatctctggtcatacaacgcggagcttcttgttgccctggagaaccaacatacaattgatctaactgactcagaaatgaacaaactgtttgaaaagacaaagaagcaactgagggaaaatgctgaggatatgggcaatggttgtttcaaaatataccacaaatgtgacaatgcctgcataggatcaatcagaaatggaacttatgaccatgatgtatacagagatgaagcattaaacaaccggtttcagatcaagagcgttgagctgaagtcaggatacaaagattggatcctatggatttcctttgccatatcatgttttttgctttgtgttgctttgttggggttcatcatgtgggcctgccaaaaaggcaacattaggtgcaacatttgcatttga

SEQ ID NO: 32472 - RNA, 1701 nt, synthetic construct
  misc_feature 1..1701: note = hemagglutinin__InfluenzaA__ABV30426
  source 1..1701: mol_type = other RNA
atgaagactatcattgctttgagctacattctatgtctggttttcgcccaaaaacttcccggaaatgacaacagcacggcaacgctgtgccttgggcaccatgcagtaccaaacggaacgatagtgaaaacaatcacgaatgaccaaattgaagttactaatgctactgagctggttcagagttcctcaacaggtgaaatatgcgacagtcctcatcagatccttgatggagaaaactgcacactaatagatgctctattgggagaccctcagtgtgatggcttccaaaataagaaatgggacctttttgttgaacgcagcaaagcctacagcaactgttacccttatgatgtgccggattatgcctcccttaggtcactagttgcctcatccggcacactggagtttaacaatgaaagcttcaattggactggagtcactcaaaacggaacaagctctgcttgcataaggagatctaataacagtttctttagtagattgaattggttgacccacttaaaattcaaatacccagcattgaacgtgactatgccaaacaatgaaaaatttgacaaattgtacatttggggggttcaccacccgggtacggacaatgaccaaatcttcctgtatgctcaagcatcaggaagaatcacagtctctaccaaaagaagccaacaaactgtaatcccgaatatcggatctagacccagagtaaggaatatccccagcagaataagcatttattggacaatagtaaaaccgggagacatacttttgattaacagcacagggaatctaattgctcctaggggttacttcaaaatacgaagtgggaaaagctcaataatgagatcagatgcacccattggcaaatgcaattctgaatgcataactccaaatggaagcattcccaatgacaaaccattccaaaatgtaaacaggatcacatacggggcctgtcccagatatgttaagcaaaacactctgaaattggcaacagggatgcgaaatgtaccagagaaacaaactagaggcatatttggcgcaatcgcgggtttcatagaaaatggttgggagggaatggtggatggttggtacggtttcaggcatcaaaattctgagggaataggacaagcagcagatctcaaaagcactcaagcagcaatcgatcaaatcaatgggaagctgaataggttgatcgggaaaaccaacgagaaattccatcagattgaaaaagaattctcagaagtcgaagggagaattcaggaccttgagaaatatgttgaggacaccaaaatagatctctggtcatacaacgcggagcttcttgttgccctggagaaccaacatacaattgatctaactgactcagaaatgaacaaactgtttgaaaaaacaaagaagcaactgagggaaaatgctgaggatatgggcaatggttgtttcaaaatataccacaaatgtgacaatgcctgcataggatcaatcagaaatggaacttatgaccacgatgtatacagagatgaagcattaaacaaccggttccagatcaagggcgttgagctgaagtcaggatacaaagattggatcctatggatttcctttgccatatcatgttttttgctttgtgttgctttgttggggttcatcatgtgggcctgccaaaaaggcaacattaggtgcaacatttgcatttga

SEQ ID NO: 32473 - RNA, 1701 nt, synthetic construct
  misc_feature 1..1701: note = hemagglutinin__InfluenzaA__ABV30437
  source 1..1701: mol_type = other RNA
atgaagactatcattgctttgagctacattctatgtctggttttcgcccaaaaacttcccggaaatgacaacagcacggcaacgctgtgccttgggcaccatgcagtaccaaacggaacgatagtgaaaacaatcacgaatgaccaaattgaagttactaatgctactgagctggttcagagttcctcaacaggtgaaatatgcgacagtcctcatcagatccttgatggagaaaactgcacactaatagatgctctattgggagaccctcagtgtgatggcttccaaaataagaaatgggacctttttgttgaacgcagcaaagcctacagcaactgttacccttatgatgtgccggattatgcctcccttaggtcactagttgcctcatccggcacactggagtttaacaatgaaagcttcaattggactggagtcactcaaaacggaacaagctctgcttgcataaggagatctaatcacagtttctttagtagattgaattggttgacccacttaaaattcaaatacccagcattgaacgtgactatgccaaacaatgaaaaatttgacaaattgtacatttggggggttcaccacccgggtacggacaatgaccaaatcttcctgtatgctcaagcatcaggaagaatcacagtctctaccaaaagaagccaacaaactgtaatcccgaatatcggatctagacccagagtaaggaatatccccagcagaataagcatttattggacaatagtaaaaccgggagacatacttttgattaacagcacagggaatctaattgctcctaggggttacttcaaaatacgaagtgggaaaagctcaataatgagatcagatgcacccattggcaaatgcaattctgaatgcataactccaaatggaagcattcccaatgacaaaccattccaaaatgtaaacaggatcacatacggggcctgtcccagatatgttaagcaaaacactctgaaattggcaacagggatgcgaaatgtaccagagaaacaaactagaggcatatttggcgcaatcgcgggtttcatagaaaatggttgggagggaatggtggatggttggtacggtttcaggcatcaaaattctgagggaataggacaagcagcagatctcaaaagcactcaagcagcaatcgatcaaatcaatgggaagctgaataggttgatcgggaaaaccaacgagaaattccatcagattgaaaaagaattctcagaagtcgaagggagaattcaggaccttgagaaatatgttgaggacaccaaaatagatctctggtcatacaacgcggagcttcttgttgccctggagaaccaacatacaattgatctaactgactcagaaatgaacaaactgtttgaaaaaacaaagaagcaactgagggaaaatgctgaggatatgggcaatggttgtttcaaaatataccacaaatgtgacaatgcctgcataggatcaatcagaaatggaacttatgaccacgatgtatacagagatgaagcattaaacaaccggttccagatcaagggcgttgagctgaagtcaggatacaaagattggatcctatggatttcctttgccatatcatgttttttgctttgtgttgctttgttggggttcatcatgtgggcctgccaaaaaggcaacattaggtgcaacatttgcatttga

SEQ ID NO: 32474 - RNA, 1701 nt, synthetic construct; identical to SEQ ID NO: 32472
  misc_feature 1..1701: note = hemagglutinin__InfluenzaA__ABV30448
  source 1..1701: mol_type = other RNA

SEQ ID NO: 32475 - RNA, 1698 nt, synthetic construct
  misc_feature 1..1698: note = hemagglutinin__InfluenzaA__ABV30459
  source 1..1698: mol_type = other RNA
atgaaagtaaaactactgattctgttatgtacatttacagctacatatgcagacacaatatgtataggctaccatgccaacaactcgaccgacactgttgacacagtacttgagaagaatgtgacagtgacacactctgtcaacctacttgaggacagtcacaatggaaaactatgtctactaaaaggaatagccccactacaattgggtaattgcagcgttgccggatggatcttaggaaacccagaatgtgaattactgatttccaaggaatcatggtcctacattgtagaggcaccaaatcctgagaatggaacatgttacccagggtatttcgccgactatgaggagctgagagagcaattgagttcagtatcttcatttgagaggttcgaaatattccccaaagagagctcatggcccaaccacaccgtaaccggagtatcagcatcatgctcccataacgggaaaagcagtttttacagaaatttgctgtggctgacggggaagaatggtttgtatccaaacctgagcaagtcctatgcaaacaacaaagagaaagaagtccttgtactgtggggtgttcatcacccgcctaacataggggaccaaagggccctctatcatacagaaaatgcttatgtctctgtagtgtcttcacattatagcagaagattcaccccagaaatagccaaaagacccaaggtgagagatcaggaaggaagaatcaactactactggactctgcttgaacccggggatacaataatatttgaggcaaatggaaatctaatagcgccaaggtttgctttcgcactgagtagaggctttggatcaggaatcatcacctcaaatgcaccaatggatgaatgtgatgcgaaatgtcaaacacctcagggagctataaacagcagtcttcctttccagaatgtacacccagtcacaataggagagtgtccaaagtatgtcaggagtacaaaattaagaatggttacaggactaaggaacatcccatccattcaatccagaggtttatttggagccattgccggtttcattgaaggggggtggactggaatggtagatggttggtatggttatcaccatcagaatgagcaaggatctgggtatgctgcagatcaaaaaagcacacaaaatgccattaacgggattacaaacaaggtgaattctgtaattgagaaaatgaacactcaattcacagctgtgggcaaagaattcaacaaattggaaagaaggatggaaaacttaaataaaaaagttgatgatgggtttctagacatttggacatataacgcagaattgttggttctactggaaaatgaaaggactttggacttccatgactccaacgtgaagaatctgtatgagaaagtaaaaagccaattaaagaataatgccaaagaaataggaaacgggtgttttgaattctatcacaagtgtaacgatgaatgcatggagagtgtgaaaaatggaacttatgactatccaaaatattccgaagaatcaaagttgaacagggagaaaattgatggagtgaaattggaatcaatgggagtctatcagattttggcgatctactcaacagtcgccagttccctggttcttttggtctccctgggggcaatcagcttctggatgtgttccaatgggtctttgcagtgtagaatatgcatctaa

SEQ ID NO: 32476 - RNA, 1701 nt, synthetic construct; identical to SEQ ID NO: 32472
  misc_feature 1..1701: note = hemagglutinin__InfluenzaA__ABV30470
  source 1..1701: mol_type = other RNA

SEQ ID NO: 32477 - RNA, 1698 nt, synthetic construct; identical to SEQ ID NO: 32430
  misc_feature 1..1698: note = hemagglutinin__InfluenzaA__ABV30492
  source 1..1698: mol_type = other RNA

SEQ ID NO: 32478 - RNA, 1698 nt, synthetic construct
  misc_feature 1..1698: note = hemagglutinin__InfluenzaA__ABV30503
  source 1..1698: mol_type = other RNA
atgaaagtaaaactactgattctgttatgtacatttacagctacatatgcagacacaatatgtataggctaccatgccaacaactcgaccgacactgttgacacagtacttgagaagaatgtgacagtgacacactctgtcaacctacttgaggacagtcacaatggaaaactatgtctactaaaaggaatagccccactacaattgggtaattgcagcgttgccggatggatcttaggaaacccagaatgcgaattgctgatttccaaggaatcatggtcctacattgtagagacaccaaatcctgagaatggaacatgttacccagggtatttcgccgactatgaggagctgagagagcaattgagttcagtatcttcatttgagaggttcgaaatattccccaaagagagctcatggcccaaccacaccataaccggagtatcagcatcatgctcccataacgggaaaagcagtttttacagaaatttgctatggctgacggggaagaatggtttgtatccaaacctgagcaagtcctatgcaaacaacaaagagaaagaagtccttgtactgtggggtgttcatcacccgcctaacataggggaccaaagggccctctatcatacagaaaatgcttatgtctctgtagtgtcttcacattatagcagaagattcaccccagaaatagccaaaagacccaaggtgagagatcaggaaggaagaatcaactactactggactctgcttgaacccggggatacaataatatttgaggcaaatggaaatctaatagcaccaaggtttgctttcgcactgagtagaggctttggatcaggaatcatcacctcaaatgcaccaatggatgaatgtgatgcgaaatgtcaaacacctcagggagctataaacagcagtcttcctttccagaatgtacacccagtcacaataggagagtgtccaaagtatgtcaggagtacaaaattaagaatggttacaggactaaggaacatcccatccattcaatccagaggtttatttggagccattgccggtttcattgaaggggggtggactggaatggtagatggttggtatggttatcaccatcagaatgagcaaggatctgggtatgctgcagatcaaaaaagcacccaaaatgccattaacgggattacaaacaaggtgaattctgtaattgagaaaatgaacactcaattcacagctgtgggcaaagaattcaacaaattggaaagaaggatggaaaacttaaataaaaaagttgatgatgggtttctagacatttggacatataacgcagaattgttggttctactggaaaatgaaaggactttggacttccatgactccaacgtgaagaatctgtatgagaaagtaaaaagccaattaaagaataatgccaaagaaataggaaacgggtgttttgaattctatcacaagtgtaacgatgaatgcatggagagtgtgaaaaatggaacttatgactatccaaaatattccgaagaatcaaagttgaacagggagaaaattgatggagtgaaattggaatcaatgggagtctatcagattttggcgatctactcaacagtcgccagttccctggttcttttggtctccctgggggcaatcagcttctggatgtgttccaatgggtctttgcagtgtagaatatgcatctaa

SEQ ID NO: 32479 - RNA, 1701 nt, synthetic construct; identical to SEQ ID NO: 32445
  misc_feature 1..1701: note = hemagglutinin__InfluenzaA__ABV30514
  source 1..1701: mol_type = other RNA

SEQ ID NO: 32480 - RNA, 1698 nt, synthetic construct
  misc_feature 1..1698: note = hemagglutinin__InfluenzaA__ABV30525
  source 1..1698: mol_type = other RNA
atgaaagtaaaactacttgttctgttatgtacatttacagctacatatgcagacacaatatgtataggctaccatgccaacaactcgaccgacactgttgacacagtacttgagaagaatgtgacagtgacacactctgtcaacctacttgaggacagtcacaatggaaaactatgtctactaaaaggaatagccccactacaattgggtaattgcagcgttgccggatggatcttaggaaacccagaatgcgaattactgatttccaaggaatcatggtcctacattgtagaaacaccaaatcctgagaatggaacatgttacccagggtatttcgccgactatgaggagctgagggagcaattgagttcagtatcttcatttgagaggttcgaaatattccccaaagagagctcatggcccaaccacaccgtaaccggagtatcagcatcatgctcccatagtgggaaaagcagtttttacagaaatttgctatggctgacggggaagaatggtttgtatccaaacctgagcaagtcctatgcaaacaacaaagagaaagaagtccttgtactgtggggtgttcatcacccgcctaacataggggaccaaagggccctctatcatacagaaaatgcttatgtctctgtagtgtcttcacattatagcagaagattcaccccagaaatagccaaaagacccaaggtgagagatcaggaaggaagaatcaactactactggactctgctggaacccggggatacaataatatttgaggcaaatggaaatctaatagcgccaaggtttgctttcgcactgagtagaggctttggatcaggaatcatcacctcaaatacaccaatgggtgaatgtgatgcgaagtgtcaaacacctcagggagctataaacagtagtcttcctttccagaatgtacatccagtcacaataggggagtgtccaaagtatgtcaggagtgcaaaattaagaatggttacaggactaaggaacatcccatccattcaatcccgaggtttgtttggagccattgccggtttcattgaaggggggtggactggaatggtagatggttggtatggttatcaccatcagaatgagcaaggatctgggtatgctgcagatcaaaaaagcacacaaaatgccattaacgggattacaaacaaggtgaattctgtaattgagaaaatgaacactcaattcacagctgtgggcaaagaattcaacaaattggaaagaaggatggaaaacttaaataaaaaggttgatgatgggtttctagacatttggacatataacgcagaattgttggttctactggaaaatgaaaggactttggacttccatgactccaacgtgaagaatctgtatgagaaagtaaaaagccaattaaagaataatgccaaagaaataggaaacgggtgttttgaattctatcacaagtgtaacgatgaatgcatggagagtgtgaaaaatggaacttatgactatccaaaatattccgaagaatcaaagttgaacagggagaaaattgatggagtgaaattggaatcaatgggagtctatcagattctggcgatctactcaacagtcgccagttccctggttcttttggtctccctgggggcaatcagcttctggatgtgttccaatgggtctttgcagtgtagaatatgcatctaa

SEQ ID NO: 32481 - RNA, 1698 nt, synthetic construct; identical to SEQ ID NO: 32429
  misc_feature 1..1698: note = hemagglutinin__InfluenzaA__ABV30536
  source 1..1698: mol_type = other RNA

SEQ ID NO: 32482 - RNA, 1698 nt, synthetic construct
  misc_feature 1..1698: note = hemagglutinin__InfluenzaA__ABV30547
  source 1..1698: mol_type = other RNA
atgaaagtaaaactacttgttctgttatgtacatttacagctacatatgcagacacaatatgtataggctaccatgccaacaactcgactgacactgttgacacagtacttgagaagaatgtgacagtgacacactctgtcaacctacttgaggacagtcacaatggaaaactatgtctactaaaaggaatagccccactacaattgggtaattgcagcgttgccggatggatcttagggaacccagaatgcgaattactgatttccaaggaatcatggtcctacattgtagaaacaccaaatcctgagaatggaacatgttacccagggtatttcgccgactatgaggagctgagggagcaattgagttcagtatcttcatttgagaggttcgaaatattccccaaagagagctcatggcccaaccacaccgtaaccggagtatcagcatcatgctcccataacggggaaagcagtttttacagaaatttgttatggctgacggggaagaatggtttgtatccaaacctgagcaagtcctatgcaaacaacaaagagaaagaagtccttgtactgtggggtgttcatcacccgcctaacataggagaccaaagggccctctatcatacagaaaatgcctatgtctctgtagtgtcttcacattatagcagaagattcaccccagaaatagccaaaagacccaaggtgagagatcaggaaggaagaatcaactactactggactctgctggaacccggggatacaataatatttgaggcaaatggaaatctaatagcgccaaggtttgctttcgcactgagtagaggctttggatcaggaatcatcacctcaaatgcaccaatggataaatgtgatgcgaagtgtcaaacacctcagggagctataaacagcagtcttcctttccagaatgtacacccagtcacaataggagagtgtccaaagtatgtcaggagtacaaaattaagaatggttacaggactaaggaacatcccatccattcaatccagaggtttgtttggagccattgccggtttcattgaaggggggtggactggaatggtagatggttggtatggttatcaccatcagaatgagcaaggatctgggtatgctgcagatcaaaaaagcacacaaaatgccattaacgggattacaaacaaggtgaattctgtaattgagaaaatgaacactcaattcacagctgtgggcaaagaattcaacaaattggaaagaaggatggaaaatttaaataaaaaggttgatgatgggtttctagacatttggacatataacgcagaattgttggttctactggaaaatgaaaggactttggacttccatgactccaacgtgaagaatctgtatgagaaagtaaaaagccaattaaagaataatgccaaagaaataggaaacgggtgttttgaattctatcacaagtgtaacgatgaatgcatggagagtgtgaaaaatggaacttatgactatccaaaatattccgaagaatcaaagttgaacagggagaaaattgatggagtgaaattggaatcaatgggagtctatcagattctggcgatctactcaacagtcgccagttccttggttcttttggtctccctgggggcaatcagcttctggatgtgttccaatgggtctttgcagtgtagaatatgcatctaa

SEQ ID NO: 32483 - RNA, 1698 nt, synthetic construct
  misc_feature 1..1698: note = hemagglutinin__InfluenzaA__ABV30558
  source 1..1698: mol_type = other RNA
atgaaagtaaaactactggttctgttatgtacatttacagctacatatgcagacacaatatgtataggctaccatgccaacaactcgaccgacactgttgacacagtacttgagaagaatgtgacagtgacacactctgtcaacctacttgaggacagtcacaatggaaaactatgtctactaaaaggaatagccccactacaattgggtaattgcagcgttgccggatggatcttaggaaacccagaatgcgaattactgatttccaaggaatcatggtcctacattgtagagacaccaaatcctgagaatggaacatgttacccagggtatttcgccgactatgaggagctgagagagcaattgagttcagtatcttcatttgagaggttcgaaatattccccaaagagagctcatggcccaaccacaccgtaaccggagtatcagcatcatgctcccataacgggaaaagcagtttttacagaaatttgctatggctgacggggaagaatggtttgtatccaaacctgagcaagtcctatgcaaacaacaaagagaaagaagtccttgtactgtggggtgttcatcacccgcctaacataggggaccaaagggccctctatcatacagaaaatgcttatgtctctgtagtgtcttcacattatagcagaagattcaccccagaaatagccaaaagacccaaggtgagagatcaggaaggaagaatcaactactactggactctgcttgaacccggggatacaataatatttgaggcaaatggaaatctaatagcgccaaggtttgctttcgcactgagtagaggctttggatcaggaatcatcacctcaaatgcaccaatggatgaatgtgatgcgaaatgtcaaacacctcagggagctataaacagcagtcttcctttccagaatgtacacccagtcacaataggagagtgtccaaagtatgtcaggagtacaaaattaagaatggttacaggactaaggaacatcccatccattcaatccagaggtttgtttggagccattgccggtttcattgaaggggggtggactggaatggtagatggttggtatggttatcaccatcaaaatgagcaaggatctgggtatgctgcagatcaaaaaagcacacaaaatgccattaacgggattacaaacaaggtgaattctgtaattgagaaaatgaacactcaattcacagctgtgggcaaagaattcaacaaattggaaagaaggatggaaaacttaaataaaaaagttgatgatgggtttctagacatttggacatataacgcagaattgttggttctactggaaaatgaaaggactttggacttccatgactccaacgtgaagaatctgtatgagaaagtaaaaagccaattaaagaataatgccaaagaaataggaaacgggtgttttgaattctatcacaagtgtaacgatgaatgcatggagagtgtgaaaaatggaacttatgactatccaaaatattccgaagaatcaaagttgaacagggagaaaattgatggagtgaaattggaatcaatgggagtctatcagattttggcgatctactcaacagtcgccagttccctggttcttttggtctccctgggggcaatcagcttctggatgtgttccaatgggtctttgcagtgtagaatatgcatctaa

SEQ ID NO: 32484 - RNA, 1698 nt, synthetic construct
  misc_feature 1..1698: note = hemagglutinin__InfluenzaA__ABV30569
  source 1..1698: mol_type = other RNA
atgaaagtaaaactactgattctgttatgtacatttaccgctacatatgcagacacaatatgtataggctaccatgccaacaactcgaccgacactgttgacacagtacttgagaagaatgtgacagtgacacactctgtcaacctacttgaggacaatcacaatggaaaactatgtctactaaaaggaatagccccactacaattgggtaattgcagcgttgccggatggatcttaggaaacccagaatgcgaattgctgatttccaaggaatcatggtcctacattgtagagacaccaaatcctgagaatggaacatgttacccagggtatttcgccgactatgaggagctgagagagcaattgagttcagtatcttcatttgagaggttcgaaatattccccaaagagagctcatggcccaaccacaccgtaaccggagtatcagcatcatgctcccataacgggaaaagcagtttttacagaaatttgctatggctgacggggaagaatggtttgtatccaaacctgagcaagtcctatgcaaacaacaaagagaaagaagtccttgtactgtggggtgttcatcacccgcctaacataggggaccaaagggccctctatcatacagaaaatgcttatgtctctgtagtgtcttcacattatagcagaagattcaccccagaaatagccaaaagacccaaggtgagagatcaggaaggaagaatcaactactactggactctgcttgaacccggggatacaataatatttgaggcaaatggaaatctaatagcgccaaggtttgctttcgcactgagtagaggctttggatcaggaatcatcacctcaaatgcaccaatggatgaatgtgatgcgaaatgtcaaacacctcagggagctataaacagcagtcttcctttccagaatgtacacccagtcacaataggagagtgtccaaagtatgtcaggagtacaaaattaagaatggttacaggactaaggaacatcccatccattcaatcaagaggtttatttggagccattgctggtttcattgaaggggggtggactggaatggtagatggttggtatggttatcaccatcagaatgagcaaggatctgggtatgctgcagatcaaaaaagcacacaaaatgccattaacgggattacaaacaaggtgaattctgtaattgagaaaatgaacactcaattcacagctgtgggcaaagaattcaacaaattggaaagaaggatggaaaacttaaataaaaaagttgatgatgggtttctagacatttggacatataacgcagaattgttggttctactggaaaatgaaaggactttggacttccatgactccaacgtgaagaatctgtatgagaaagtaaaaagccaattaaagaataatgccaaagaaataggaaacgggtgttttgaattctatcacaagtgtaacgatgaatgcatggagagtgtgaaaaatggaacttatgactatccaaaatattccgaagaatcaaagttgaacagggagaaaattgatggagtgaaattggaatcaatgggagtctatcagattttggcgatctactcaacagtcgccagttccctggttcttttggtctccctgggggcaatcagcttctggatgtgttccaatgggtctttgcagtgtagaatatgcatctaa

SEQ ID NO: 32485 - RNA, 1698 nt, synthetic construct; identical to SEQ ID NO: 32429
  misc_feature 1..1698: note = hemagglutinin__InfluenzaA__ABV30580
  source 1..1698: mol_type = other RNA

SEQ ID NO: 32486 - RNA, 1698 nt, synthetic construct
  misc_feature 1..1698: note = hemagglutinin__InfluenzaA__ABV30591
  source 1..1698: mol_type = other RNA
atgaaagtaaaactactgattctgttatgtacatttacagctacatatgcagacacaatatgtataggctaccatgccaacaactcgaccgacactgttgacacagtacttgagaagaatgtgacagtgacacactctgtcaacctacttgaggacagtcacaatggaaaactatgtctactaaaaggaatagccccactacaattgggtaattgcagcgttgccggatggatcttaggaaacccagaatgcgaattactgatttccaaggaatcatggtcctacattgtagagacaccaaatcctgagaatggaacatgttacccagggtatttcgccgactatgaggagctgagagagcaattgagttcagtatcttcatttgagaggttcgaaatattccccaaagagagctcatggcccaaccacaccgtaaccggagtatcagcatcatgctcccataacgggaaaagcagtttttacagaaatttgctatggctgacggggaagaatggtttgtatccaaacctgagcaagtcctatgcaaacaacaaagagaaagaagtccttgtactgtggggtgttcatcacccgcctaacataggggaccaaagggccctctatcatacagaaaatgcttatgtctctgtagtgtcttcacattatagcagaagattcaccccagaaatagccaaaagacccaaggtgagagatcaggaaggaagaatcaactactactggactctgcttgaacccggggatacaataatatttgaggcaaatggaaatctaatagcgccaaggtttgctttcgcactgagtagaggctttggatcaggaatcatcacctcaaatgcaccaatggatgaatgtgatgcgaaatgtcaaacacctcagggagctataaacagcagtcttccttttcagaatgtacacccagtcacaataggagagtgtccaaagtatgtcaggagtacaaaattaagaatggttacaggactaaggaacatcccatccattcaatccagaggtttatttggagccattgccggtttcattgaaggggggtggactggaatggtagatggttggtatggttatcaccatcagaatgagcaaggatctgggtatgctgcagatcaaaaaagcacacaaaatgccattaacgggattacaaacaaggtgaattctgtaattgagaaaatgaacactcaattcacagctgtgggcaaagaattcaacaaattggaaagaaggatggaaaacttaaataaaaaagttgatgatgggtttctagacatttggacatataacgcagaattgttggttctactggaaaatgaaaggactttggacttccatgactccaacgtgaagaatctgtatgagaaagtaaaaagccaattaaagaataatgccaaagaaataggaaacgggtgttttgaattctatcacaagtgtaacgatgaatgcatggagagtgtgaaaaatggaacttatgactatccaaaatattccgaagaatcaaagttgaacagggagaaaattgatggagtgaaattggaatcaatgggagtctatcagattttggcgatctactcaacagtcgccagttccctggttcttttggtctccctgggggcaatcagcttctggatgtgttccaatgggtctttgcagtgtagaatatgcatctaa

SEQ ID NO: 32487 - RNA, 1698 nt, synthetic construct; identical to SEQ ID NO: 32424
  misc_feature 1..1698: note = hemagglutinin__InfluenzaA__ABV30602
  source 1..1698: mol_type = other RNA

SEQ ID NO: 32488 - RNA, 1698 nt, synthetic construct
  misc_feature 1..1698: note = hemagglutinin__InfluenzaA__ABV30613
  source 1..1698: mol_type = other RNA
atgaaagtaaaactactgattctgttatgtacatttacagctacatatgcagacacaatatgtataggctaccatgccaacaactcgaccgacactgttgacacagtacttgagaagaatgtgacagtgacacactctgtcaacctacttgaggacagtcacaatggaaaactatgtctactaaaaggaatagccccactacaattgggtaattgcagcgttgccggatggatcttaggaaacccagaatgcgaattgctgatttccaaggaatcatggtcctacattgtagagacaccaaatcctgagaatggaacatgttacccagggtatttcgccgactatgaggagctgagagagcaattgagttcagtatcttcatttgagaggttcgaaatattccccaaagagagctcatggcccaaccacaccgtaaccggagtatcagcatcatgctcccataacgggaaaagcagtttttacagaaatttgctatggctgacggggaagaatggtttgtatccaaacctgagcaagtcctatgcaaacaacaaagagaaagaagtccttgtactgtggggtgttcatcacccgcctaacataggggaccaaagggccctctatcatacagaaaatgcttatgtctctgtagtgtcttcacattatagcagaagattcaccccagaaatagccaaaagacccaaggtgagagatcaggaaggaagaatcaactactactggactctgcttgaacccggggatacaataatatttgaggcaaatggaaatctaatagcgccaaggtttgctttcgcactgagtagaggctttggatcaggaatcatcacctcaaatgcaccaatggatgaatgtgatgcgaaatgtcaaacacctcagggagctataaacagcagtcttcctttccagaatgtacacccagtcacaataggagagtgtccaaagtatgtcaggagtacaaaattaagaatggttacaggactaaggaacatcccatccattcaatccagaggtttatttggagccattgccggtttcattgaaggggggtggactggaatggtagatggttggtatggttatcaccatcagaatgagcaaggatctgggtatgcagcagatcaaaaaagcacacaaaatgccattaacgggattacaaacaaggtgaattctgtaattgagaaaatgaacactcaattcacagctgtgggcaaagaattcaacaaattggaaagaaggatgaaaaacttaaataaaaaagttgatgatgggtttctagacatttggacatataacgcagaattgttggttctactggaaaatgaaaggactttggacttccatgactccaacgtgaagaatctgtatgagaaagtaaaaagccaattaaagaataatgccaaagaaataggaaacgggtgttttgaattctatcacaagtgtaacgatgaatgcatggagagtgtgaaaaatggaacttatgactatccaaaatattccgaagaatcaaagttgaacagggagaaaattgatggagtgaaattggaatcaatgggagtctatcagattttggcgatctactcaacagtcgccagttccctggttcttttggtctccctgggggcaatcagcttctggatgtgttccaatgggtctttgcagtgtagaatatgcatctaa

SEQ ID NO: 32489 - RNA, 1698 nt, synthetic construct
  misc_feature 1..1698: note = hemagglutinin__InfluenzaA__ABV30624
  source 1..1698: mol_type = other RNA
atgaaagtaaaactactgattctgttatgtacatttaccgctacatatgcagacacaatatgtataggctaccatgccaacaactcgaccgacactgttgacacagtacttgagaagaatgtgacagtgacacactctgtcaacctacttgaggacagtcacaatggaaaactatgtctactaaaaggaatagccccactacaattgggtaattgcagcgttgccggatggatcttaggaaacccagaatgcgaattgctgatttccaaggaatcatggtcctacattgtagagacaccaaatcctgagaatggaacatgttacccagggtatttcgccgactatgaggagctgagagagcaattgagttcagtatcttcatttgagaggttcgaaatattccccaaagagagctcatggcccaaccacaccgtaaccggagtatcagcatcatgctcccataacgggaaaagcagtttttacagaaatttgctatggctgacggggaagaatggtttgtatccaaacctgagcaagtcctatgcaaacaacaaagagaaagaagtccttgtactgtggggtgttcatcacccgcctaacataggggaccaaagggccctctatcatacagaaaatgcttatgtctctgtagtgtcttcacattatagcagaagattcaccccagaaatagccaaaagacccaaggtgagagatcaggaaggaagaatcaactactactggactctgcttgaacccggggatacaataatatttgaggcaaatggaaatctaatagcgccaaggtttgctttcgcactgagtagaggctttggatcaggaatcatcacctcaaatgcaccaatggatgaatgtgatgcgaaatgtcaaacacctcagggagctataaacagcagtcttcctttccagaatgtacacccagtcacaataggagagtgtccaaagtatgtcaggagtacaaaattaagaatggttacaggactaaggaacatcccatccattcaatcaagaggtttatttggagccattgctggtttcattgaaggggggtggactggaatggtagatggttggtatggttatcaccatcagaatgagcaaggatctgggtatgctgcagatcaaaaaagcacacaaaatgccattaacgggattacaaacaaggtgaattctgtaattgagaaaatgaacactcaattcacagctgtgggcaaagaattcaacaaattggaaagaaggatggaaaacttaaataaaaaagttgatgatgggtttctagacatttggacatataacgcagaattgttggttctactggaaaatgaaaggactttggacttccatgactccaacgtgaagaatctgtatgagaaagtaaaaagccaattaaagaataatgccaaagaaataggaaacgggtgttttgaattctatcacaagtgtaacgatgaatgcatggagagtgtgaaaaatggaacttatgactatccaaaatattccgaagaatcaaagttgaacagggagaaaattgatggagtgaaattggaatcaatgggagtctatcagattttggcgatctactcaacagtcgccagttccctggttcttttggtctccctgggggcaatcagcttctggatgtgttccaatgggtctttgcagtgtagaatatgcatctaa

SEQ ID NO: 32490 - RNA, 1701 nt, synthetic construct
  misc_feature 1..1701: note = hemagglutinin__InfluenzaA__ABV30646
  source 1..1701: mol_type = other RNA
atgaagactatcattgctttgagctacattctatgtctggttttcgctcaaaaacttcccggaaatgacaacagcacggcaacgctgtgccttgggcaccatgcagtaccaaacggaacgatagtgaaaacaatcacgaatgaccaaattgaagttactaatgctactgagctggttcagagttcctcaacaggtgaaatatgcgacagtcctcatcagatccttgatggagaaaactgcacactaatagatgctctattgggagaccctcagtgtgatggcttccaaaataagaaatgggacctttttgttgaacgcagcaaagcctacagcaactgttacccttatgatgtgccggattatgcctcccttaggtcactagttgcctcatccggcacactggagtttaacaatgaaagcttcaattggactggagtcactcaaaacggaacaagctctgcttgcataaggagatctaataacagtttctttagtagattgaattggttgacccacttaaaattcaaatacccagcattgaacgtgactatgccaaacaatgaaaaatttgacaaattgtacatttggggggttcaccacccgggtacgtacaatgaccaaatcttcctgtatgctcaagcatcaggaagaatcacagtctctaccaaaagaagccaacaaactgtaatcccgaatatcggatctagacccagagtaaggaatatccccagcagaataagcatctattggacaatagtaaaaccgggagacatacttttgattaacagcacagggaatctaattgctcctaggggttacttcaaaatacgaagtgggaaaagctcaataatgagatcagatgcacccattggcaaatgcaattctgaatgcatcactccaaatggaagcattcccaatgacaaaccattccaaaatgtaaacaggatcacatacggggcctgtcccagatatgttaagcaaaacactctgaaattggcaacagggatgcgaaatgtaccagagaaacaaactagaggcatatttggcgcaatcgcgggtttcatagaaaatggttgggagggaatggtggatggttggtacggtttcaggcatcaaaattctgagggaataggacaagcagcagatctcaaaagcactcaagcagcaatcgatcaaatcaatgggaagctgaataggttgatcgggaaaaccaacgagaaattccatcagattgaaaaagaattctcagaagtcgaagggagaattcaggaccttgagaaatatgttgaggacaccaaaatagatctctggtcatacaacgcggagcttcttgttgccctggagaaccaacatacaattgatctaactgactcagaaatgaacaaactgtttgaaaaaacaaagaagcaactgagggaaaatgctgaggatatgggcaatggttgtttcaaaatataccacaaatgtgacaatgcctgcataggatcaatcagaaatggaacttatgaccacgatgtatacagagatgaagcattaaacaaccggttccagatcaagggcgttgagctgaagtcaggatacaaagattggatcctatggatttcctttgccatatcatgttttttgctttgtgttgctttgttggggttcatcatgtgggcctgccaaaaaggcaacattaggtgcaacatttgcatttga

SEQ ID NO: 32491 - RNA, 1701 nt, synthetic construct
  misc_feature 1..1701: note = hemagglutinin__InfluenzaA__ABV30657
  source 1..1701: mol_type = other RNA
atgaagactatcattgctttgagctacattctatgtctggttttcgctcaaaaacttcctggaaatgacaacagcacggcaacgctgtgccttgggcaccatgcagtaccaaacggaacgatagtgaaaacaatcacgaatgaccaaattgaagttactaatgctactgagctggttcagagttcctcaacaggtgaaatatgcgacagtcctcatcagatccttgatggagaaaactgcacactaatagatgctctattgggagaccctcagtgtgatggcttccaaaataagaaatgggacctttttgttgaacgcagcaaagcctacagcaactgttacccttatgatgtgccggattatgcctcccttaggtcactagttgcctcatccggcacactggagtttaacaatgaaagcttcaattggactggagtcactcaaaacggaacaagctctgcttgcataaggagatctaataacagtttctttagtagattgaattggttgacccacttaaaattcaaatacccagcattgaacgtgactatgccaaacaatgaaaaatttgacaaattgtacatttggggggttcaccacccgggtacggacaatgaccaagtcttcctgtatgctcaagcatcaggaagaatcacagtctctaccaaaagaagccaacaaactgtaatcccgaatatcggatctagacccagagtaaggaatatccccagcagaataagcatctattggacaatagtaaaaccgggagacatacttttgattaacagcacagggaatctaattgctcctaggggttacttcaaaatacgaagtgggaaaagctcaataatgagatcagatgcacccattggcaaatgcaattctgaatgcatcactccaaatggaagcattcccaatgacaaaccattccaaaatgtaaacaggatcacatacggggcctgtcccagatatgttaagcaaaacactctgaaattggcaacagggatgcgaaatgtaccagagaaacaaactagaggcatatttggcgcaatcgcgggtttcatagaaaatggttgggagggaatggtggatggttggtacggtttcaggcatcaaaattctgagggaataggacaagcagcagatctcaaaagcactcaagcagcaatcgatcaaatcaatgggaagctgaataggttgatcgggaaaaccaacgagaaattccatcagattgaaaaagaattctcagaagtcgaagggagaattcaggaccttgagaaatatgttgaggacaccaaaatagatctctggtcatacaacgcggagcttcttgttgccctggagaaccaacatacaattgatctaactgactcagaaatgaacaaactgtttgaaaaaacaaagaagcaactgagggaaaatgctgaggatatgggcaatggttgtttcaaaatataccacaaatgtgacaatgcctgcataggatcaatcagaaatggaacttatgaccacgatgtatacagagatgaagcattaaacaaccggttccagatcaagggcgttgagctgaagtcaggatacaaagattggatcctatggatttcctttgccatatcatgttttttgctttgtgttgctttgttggggttcatcatgtgggcctgccaaaaaggcaacattaggtgcaacatttgcatttga

SEQ ID NO: 32492 - RNA, 1701 nt, synthetic construct; identical to SEQ ID NO: 32491
  misc_feature 1..1701: note = hemagglutinin__InfluenzaA__ABV45860
  source 1..1701: mol_type = other RNA

SEQ ID NO: 32493 - RNA, 1698 nt, synthetic construct; identical to SEQ ID NO: 32459
  misc_feature 1..1698: note = hemagglutinin__InfluenzaA__ABV45871
  source 1..1698: mol_type = other RNA

SEQ ID NO: 32494 - RNA, 1698 nt, synthetic construct
  misc_feature 1..1698: note = hemagglutinin__InfluenzaA__ABV45882
  source 1..1698: mol_type = other RNA
atgaaagtaaaactactggttctgttatgtacatttacagctacatatgcagacacaatatgtataggctaccatgccaacaactcgaccgacactgttgacacagtacttgagaagaatgtgacagtgacacactctgtcaacctacttgaggacagtcacaatggaaaactatgtctactaaaaggaatagccccactacaattgggtaattgcagcgttgccggatggatcttaggaaacccagaatgcgaattactgatttccaaggaatcatggtcctacattgtagagacaccaaatcctgagaatggaacatgttacccagggtatttcgccgactatgaggagctgagagagcaattgagttcagtatcttcatttgagaggttcgaaatattccccaaagagagctcatggcccaaccacaccgtaaccggagtatcagcatcatgctcccataacgggaaaagcagtttttacagaaatttgctatggctgacggggaagaatggtttgtatccaaacctgagcaagtcctatgcaaacaacaaagagaaagaagtccttgtactgtggggtgttcatcacccgcctaacataggggaccaaagggccctctatcatacagaaaatgcttatgtctctgtagtgtcttcacattatagcagaagattcaccccagaaatagccaaaagacccaaggtgagagatcaggaaggaagaatcaactactactggactctgcttgaacccggggatacaataatatttgaggcaaatggaaatctaatagcgccaaggtttgctttcgcactgagtagaggctttggatcaggaatcatcacctcaaatgcaccaatggatgaatgtgatgcgaaatgtcaaacacctcagggagctataaacagcagtcttcctttccagaatgtacacccagtcacaataggagagtgtccaaagtatgtcaggagtacaaaattaagaatggttacaggactaaggaacatcccatccattcaatccagaggcttgtttggagccattgccggtttcattgaaggggggtggactggaatggtagatggttggtatggttatcaccatcagaatgagcaaggatctgggtatgctgcagatcaaaaaagcacacaaaatgccattaacgggattacaaacaaggtgaattctgtaattgagaaaatgaacactcaattcacagctgtgggcaaagaattcaacaaattggaaagaaggatggaaaacttaaataaaaaagttgatgatgggtttctagacatttggacatataacgcagaattgttggttctactggaaaatgaaaggactttggacttccatgactccaacgtgaagaatctgtatgagaaagtaaaaagccaattaaagaataatgccaaagaaataggaaacgggtgttttgaattctatcacaagtgtaacgatgaatgcatggagagtgtgaaaaatggaacttatgactatccaaaatattccgaagaatcaaagttgaacagggagaaaattgatggagtgaaattggaatcaatgggagtctatcagattttggcgatctactcaacagtcgccagttccctggttcttttggtctccctgggggcaatcagcttctggatgtgttccaatgggtctttgcagtgtagaatatgcatctaa

SEQ ID NO: 32495 - RNA, 1698 nt, synthetic construct
  misc_feature 1..1698: note = hemagglutinin__InfluenzaA__ABV45893
  source 1..1698: mol_type = other RNA
atgaaagtaaaactgcttgttctgttatgtacatttacagctacatatgcagacacaatatgtataggctaccatgccaacaactcgactgacactgttgacacagtacttgagaagaatgtgacagtgacacactctgtcaacctacttgaggacagtcacaatggaaaactatgtctactaaaaggaatagccccactacaattgggtaattgcagcgttgccggatggatcttaggaaacccagaatgcgaattactgatttccaaggaatcatggtcctacattgtagaaacaccaaatcctgagaatggaacatgttacccagggtatttcgccgactatgaggagctgagggagcaattgagttcagtatcttcatttgagaggttcgaaatattccccaaagagagctcatggcccaaccacaccgtaaccggagtatcagcatcatgctcccataacggggaaagcagtttttacagaaatttgttatggctgacggggaagaatggtttgtatccaaacctgagcaagtcctatgcaaacaacaaagagaaagaagtccttgtactgtggggtgttcatcacccgcctaacataggagaccaaagggccctctatcatacagaaaatgcttatgtctctgtagtgtcttcacattatagcagaagattcaccccagaaatagccaaaagacccaaggtgagagatcaggaaggaagaatcaactactactggactctgctggaacccggggatacaataatatttgaggcaaatggaaatctaatagcgccaaggtttgctttcgcactgagtagaggctttggatcaggaatcatcacctcaaatgcaccaatggataaatgtgatgcaaagtgtcaaacacctcagggagctataaacagcagtcttcctttccagaatgtacacccagtcacaataggagagtgtccaaagtatgtcaggagtacaaaattaaggatggttacaggactaaggaacatcccatccattcaatccagaggtttgtttggagccattgccggtttcattgaaggggggtggactggaatggtagatggttggtatggttatcaccatcagaatgagcaaggatctgggtatgctgcagatcaaaaaagcacacaaaatgccattaacgggattacaaacaaggtgaattctgtaattgagaaaatgaacactcaattcacagctgtgggcaaagaattcaacaaattggaaagaaggatggaaaatttaaataaaaaggttgatgatgggtttctagacatttggacatataacgcagaattgttggttctactggaaaatgaaaggactttggacttccatgactccaacgtgaagaatctgtatgagaaagtaaaaagccaattaaagaataatgccaaagaaataggaaacgggtgttttgaattctatcacaagtgtaacgatgaatgcatggagagtgtgaaaaatggaacttatgactatccaaaatattccgaagaatcaaagttgaacagggagaaaattgatggagtgaaattggaatcaatgggagtctatcagattctggcgatctactcaacagtcgccagttccttggttcttttggtctccctgggggcaatcagcttctggatgtgttccaatgggtctttgcagtgtagaatatgcatctaa

SEQ ID NO: 32496 - RNA, 1701 nt, synthetic construct
  misc_feature 1..1701: note = hemagglutinin__InfluenzaA__ABV45904
  source 1..1701: mol_type = other RNA
atgaagactatcattgctttgagctacattctatgtctggttttcgctcaaaaacttcccggaattgacaacagcacggcaacgctgtgccttgggcaccatgcagtaccaaacggaacgatagtgaaaacaatcacgaatgaccaaattgaagttactaatgctactgagctggttcagagttcctcaacaggtggaatatgcgacagtcctcatcagatccttgatggagaaaactgcacactaatagatgctctattgggagaccctcagtgtgatggcttccaaaataagaaatgggacctttttgttgaacgcagcaaagcctacagcaactgttacccttatgatgtgccggattatgcctcccttaggtcactagttgcctcatccggcacactggagtttaacaatgaaagcttcaattggactggagtcactcaaaatggaacaagctctgcttgcaaaaggggatctaataacagtttctttagtagattgaattggttgacccactcaaaattcaaatacccagctttgaacgtgactatgccaaacaatgaagaatttgacaaattgtacatttggggggttcaccacccgggtacggacaatgaccaaatcttcctgtatgctcaagcatcaggaagaatcacagtctctaccaaaagaagccaacaaactgtaatcccgaatatcggatctagacctagagtaaggaatatccccagcagaataagcatctattggacaatagtaaaaccgggagacatacttttgattaacagcacagggaatctaattgctcctaggggttacttcaaaatacgaagtgggaaaagctcaataatgagatcagatgcacccattggcaaatgcaattctgaatgcatcactccaaatggaagcattcccaatgacaaaccatttcaaaatgtaaacaggatcacatacggggcctgtcccagatatgttaagcaaaacactctgaaattggcaacagggatgcgaaatgtaccagagaaacaaactagaggcatatttggcgcaatcgcgggtttcatagaaaatggttgggagggaatggtggatggttggtacggtttcaggcatcaaaattctgagggaataggacaagcagcagatctcaaaagcactcaagcagcaatcgatcaaatcaatgggaagctgaataggttgatcgggaaaaccaacgagaaattccaccagattgaaaaagaattctcagaagtagaagggagaattcaggacctcgagaaatatgttgaggacactaaaatagatctctggtcatacaacgcggagcttcttgttgccctggagaaccaacatacaattgatctaactgactcagaaatgaacaaactgtttgaaaagacaaagaagcaactgagggaaaatgctgaggatatgggcaatggttgtttcaaaatataccacaaatgtgacaatgcctgcataggatcaatcagaaatggaacttatgaccatgatgtatacagagatgaagcattaaacaaccggtttcagatcaagggcgttgagctgaagtcaggatacaaagattggatcctatggatttcctttgccatatcatgttttttgctttgtgttgctttgttggggttcatcatgtgggcctgccaaaaaggcaacattaggtgcaacatttgcatttga

SEQ ID NO: 32497 - RNA, 1698 nt, synthetic construct; identical to SEQ ID NO: 32482
  misc_feature 1..1698: note = hemagglutinin__InfluenzaA__ABV45926
  source 1..1698: mol_type = other RNA

SEQ ID NO: 32498 - RNA, 1698 nt, synthetic construct
  misc_feature 1..1698: note = hemagglutinin__InfluenzaA__ABV45937
  source 1..1698: mol_type = other RNA
atgaaagtaaaactacttgttctgttatgtacatttacagctacatatgcagacacaatatgtataggctaccatgccaacaactcgaccgacactgttgacacagtacttgagaagaatgtgacagtgacacactctgtcaacctacttgaggacagtcacaatggaaaactatgtctactaaaaggaatagccccactacaattgggtaattgcagcgttgccggatggatcttaggaaacccagaatgcgaattactgatttccaaggaatcatggtcctacattgtagaaacaccaaatcctgagaatggaacatgttacccaggatatttcgccgactatgaggagctgagggagcaattgagttcagtatcttcatttgagaggttcgaaatattccccaaagagagctcatggcccaaccacaccgtaaccggagtatcagcatcatgctcccataacgggaaaagcagtttttacagaaatttgctatggctgacggggaagaatggtttgtatccaaacctgagcaagtcctatgcaaacaacaaagagaaagaagtccttgtactgtggggtgttcatcacccgcctaacataggggaccaaagggccctctatcatacagaaaatgcttatgtctctgtagtgtcttcacattatagcagaagattcaccccagaaatagccaaaagacccaaggtgagagatcaggaaggaagaatcaactactactggactctgctggaacccggggatacaataatatttgagacaaatggaaatctaatagcgccaaggtttgctttcgcactgagtagaggctttggatcaggaatcatcacctcaaatgcaccaatgggtgaatgtgatgcgaagtgtcaaacacctcagggagctataaacagtagtcttcctttccagaatgtacacccagtcacaataggagagtgtccaaagtatgtcaggagtgcaaaattaagaatggttacaggactaaggaacatcccatccattcaatccagaggtttgtttggagccattgccggtttcattgaaggggggtggactggaatggtagatggttggtatggttatcaccatcagaatgagcaaggatctgggtatgctgcagatcaaaaaagcacacaaaatgccattaacgggattacaaacaaggtgaattctgtaattgagaaaatgaacactcaattcacagctgtgggcaaagaattcaacaaattggaaagaaggatggaaaacttaaataaaaaggttgatgatgggtttctagacatttggacatataacgcagaattgttggttctactggaaaatgaaaggactttggacttccatgactccaacgtgaagaatctgtatgagaaagtaaaaagccaattaaagaataatgccaaagaaataggaaacgggtgttttgaattctatcacaagtgtaacgatgaatgcatggagagtgtgaaaaatggaacttatgactatccaaaatattccgaagaatcaaagttgaacagggagaaaattgatggagtgaaattggaatcaatgggagtctatcagattctggcgatctactcaacagtcgccagttccctggttcttttggtctccctgggggcaatcagcttctggatgtgttccaatgggtctttgcagtgtagaatatgcatctaa

SEQ ID NO: 32499 - RNA, 1698 nt, synthetic construct; identical to SEQ ID NO: 32451
  misc_feature 1..1698: note = hemagglutinin__InfluenzaA__ABV45948
  source 1..1698: mol_type = other RNA

SEQ ID NO: 32500 - RNA, 1698 nt, synthetic construct
  misc_feature 1..1698: note = hemagglutinin__InfluenzaA__ABV45959
  source 1..1698: mol_type = other RNA
atgaaagtaaaactactggttctgttatgtacatttacagctacatatgcagacacaatatgtataggctaccatgccaacaactcgaccgacactgttgacacagtacttgagaagaatgtgacagtgacacactctgtcaacctacttgaggacagtcacaatggaaaactatgcctactaaaaggaatagccccactacaattgggtaattgcagcgttgccggatggatcttaggaaacccagaatgcgaattactgatttccaaggaatcatggtcctacattgtagagacaccaaatcctgagaatggaacatgttacccagggtatttcgccgactatgaggagctgagagagcaattgagttcagtatcttcatttgagaggttcgaaatattccccaaagagagctcatggcccaaccacaccgtaaccggagtatcagcatcatgctcccataacgggaaaagcagtttttacagaaatttgctatggctgacggggaagaatggtttgtatccaaacctgagcaagtcctatgcaaacaacaaagagaaagaagtccttgtactgtggggtgttcatcacccgcctaacataggggaccaaagggccctctatcatacagaaaatgcttatgtctctgtagtgtcttcacattatagcagaagattcaccccagaaatagccaaaagacccaaggtgagagatcaggaaggaagaatcaactactactggactctgcttgaacccggggatacaataatatttgaggcaaatggaaatctaatagcgccaaggtttgctttcgcactgagtagaggctttggatcaggaatcatcacctcaaatgcaccaatggatgaatgtgatgcgaaatgtcaaacacctcagggagctataaacagcagtcttcctttccagaatgtacacccagtcacaataggagagtgtccaaagtatgtcaggagtacaaaattaagaatggttacaggactaaggaacatcccatccattcaatccagaggtttgtttggagccattgccggtttcattgaaggggggtggactggaatggtagatggttggtatggttatcaccatcaaaatgagcaaggatctgggtatgctgcagatcaaaaaagcacacaaaatgccattaacgggattacaaacaaggtgaattctgtaattgagaaaatgaacactcaattcacagctgtgggcaaagaattcaacaaattggaaagaaggatggaaaacttaaataaaaaagttgatgatgggtttctagacatttggacatataacgcagaattgttggttctactggaaaatgaaaggactttggacttccatgactccaacgtgaagaatctgtatgagaaagtaaaaagccaattaaagaataatgccaaagaaataggaaacgggtgttttgaattctatcacaagtgtaacgatgaatgcatggagagtgtgaaaaatggaacttatgactatccaaaatattccgaagaatcaaagttgaacagggagaaaattgatggagtgaaattggaatcaatgggagtctatcagattttggcgatctactcaacagtcgccagttccctggttcttttggtctccctgggggcaatcagcttctggatgtgttccaatgggtctttgcagtgtagaatatgcatctaa

SEQ ID NO: 32501 - RNA, 1701 nt, synthetic construct
  misc_feature 1..1701: note = hemagglutinin__InfluenzaA__ABV45970
  source 1..1701: mol_type = other RNA
atgaagactatcattgctttgagctacattctatgtctggttttcgctcaaaaacttcccggaaatgacaacagcacggcaacgctgtgccttgggcaccatgcagtaccaaacggaacgatagtgaaaacaatcacgaatgaccaaattgaagttactaatgctactgagctggttcagagttcctcaacaggtgaaatatgcgacagtcctcaccagatccttgatggagaaaactgcacactaatagatgctctattgggagaccctcagtgtgatggcttccaaaataagaaatgggacctttttgttgaacgcagcaaagcctacagcaactgttacccttatgatgtgccggatcatgcctcccttaggtcactagttgcctcatccggcacactggagtttaacaatgaaagcttcaattggactggagtcactcaaaacggaacaagctctgcttgcataaggagatctaataacagtttctttagtagattgaattggttgacccacttaaaattcaaatacccagcattgaacgtgactatgccaaacaatgaaaaatttgacaaattgtacatttggggggttcaccacccgggtacggacaatgaccaaatcttcctgtatgctcaagcatcaggaagaatcacagtctctaccaaaagaagccaacaaactgtgatcccgaatatcggatctagacccagagtaaggaatatccccagcagaataagcatctattggacaatagtaaaaccgggagacatacttttgattaacagcacagggaatctaattgctcctaggggttacttcaaaatacaaagtgggaaaagctcaataatgagatcagatgcacccattggcaaatgcaattctgaatgcatcactccaaatggaagcattcccaatgacaaaccattccaaaatgtaaacaggatcacatacggggcctgtcccagatatgttaagcaaaacactctgaaattggcaacagggatgcgaaatgtaccagagaaacaaactagaggcatatttggcgcaatcgcgggtttcatagaaaatggttgggagggaatggtggatggttggtacggtttcaggcatcaaaattctgagggaataggacaagcagcagatctcaaaagcactcaagcagcaatcgatcaaatcaatgggaagctgaataggttgatcgggaaaaccaacgagaaattccatcagattgaaaaagaattctcagaagtcgaagggagaattcaggaccttgagaaatatgttgaggacaccaaaatagatctctggtcatacaacgcggagcttcttgttgccctggagaaccaacatacaattgatctaactgactcagaaatgaacaaactgtttgaaaaaacaaagaagcaactgagggaaaatgctgaggatatgggcaatggttgtttcaaaatataccacaaatgtgacaatgcctgcataggatcaatcagaaatggaacttatgaccacgatgtatacagagatgaagcattaaacaaccggttccagatcaagggcgttgagctgaagtcaggatacaaagattggatcctatggatttcctttgccatatcatgttttttgctttgtgttgctttgttggggttcatcatgtgggcctgccaaaaaggcaacattaggtgcaacatttgcatttga

SEQ ID NO: 32502 - RNA, 1701 nt, synthetic construct
  misc_feature 1..1701: note = hemagglutinin__InfluenzaA__ABV45981
  source 1..1701: mol_type = other RNA
atgaagactatcattgctttgagctacattctatgtctggttttcgctcaaaaacttcccggaaatgacaacagcacggcaacgctgtgccttgggcaccatgcagtaccaaacggaacgatagtgaaaacaatcacgaatgaccaaattgaagttactaatgctactgagctggttcagagttcctcaacaggtgaaatatgcgacagtcctcatcagatccttgatggagaaaactgcacactaatagatgctctattgggagaccctcagtgtgatggcttccaaaataagaaatgggacctttttgttgaacgcagcaaagcctacagcaactgttacccttatgatgtgccggattatgcctccctgaggtcactagttgcctcatccggcacactggagtttaacaatgaaagcttcaattggactggagtcactcaaaacggaacaagctctgcttgcataaggagatctaataacagtttctttagtagattgaattggttgacccacttaaaattcaaatacccagcattgaacgtgactatgccaaacaatgaaaaatttgacaaattgtacatttggggggttcaccacccgggtacggacaatgaccaaatcttcctgtatgctcaagcatcaggaagaatcacagtctctaccaaaagaagccaacaaactgtaatcccgaatatcggatctagacccagagtaaggaatatccccagcagaataagcatctattggacaatagtaaaaccgggagacatacttttgattaacagcacagggaatctaattgctcctaggggttacttcaaaatacgaagtgggaaaagctcaataatgagatcagatgcacccattggcaaatgcaattctgagtgcatcactccaaatggaagcattcccaatgacaaaccattccaaaatgtaaacaggatcacatacggggcctgtcccagatatgttaagcaaaacactctgaaattggcaacagggatgcgaaatgtaccagagaaacaaactagaggcatatttggcgcaatcgcgggtttcatagaaaatggttgggagggaatggtggatggttggtacggtttcaggcatcaaaattctgagggaataggacaagcagcagatctcaaaagcactcaagcagcaatcgatcaaatcaatgggaagctgaataggttgatcgggaaaaccaacgagaaattccatcagattgaaaaagaattctcagaagtcgaagggagaattcaggaccttgagaaatatgttgaggacaccaaaatagatctctggtcatacaacgcggagcttcttgttgccctggagaaccaacatacaattgatctaactgactcagaaatgaacaaactgtttgaaaaaacaaagaagcaactgagggaaaatgctgaggatatgggcaatggttgtttcaaaatataccacaaatgtgacaatgcctgcataggatcaatcagaaatggaacttatgaccacgatgtgtacagagatgaagcattaaacaaccggttccagatcaagggcgttgagctgaagtcaggatacaaagattggatcatatggatttcctttgccatatcatgttttttgctttgtgttgctttgttggggttcatcatgtgggcctgccaaaagggcaacattaggtgcaacatttgcatttga

SEQ ID NO: 32503 - RNA, 1698 nt, synthetic construct
  misc_feature 1..1698: note = hemagglutinin__InfluenzaA__ABV82551
  source 1..1698: mol_type = other RNA
atgaaagtaaaactacttgttctgttatgtacatttacagctacatatgcagacacaatatgtataggctaccatgccaacaactcgactgacactgttgacacagtacttgagaagaatgtgacagtgacacactctgtcaacctacttgaggacagtcacaatggaaaactatgtctactaaaaggaatagccccactacaattgggtaattgcagcgttgccggatggatcttaggaaacccagaatgcgaattactgatttccaaggaatcatggtcctacattgtagaaacaccaaatcctgagaatggaacatgttacccagggtatttcgccgactatgaggagctgagggagcaattgagttcagtatcttcatttgagaggttcgaaatattccccaaagagagctcatggcccaaccacaccgtaaccggagtatcagcatcatgctcccataacggggaaagcagtttttacagaaatttgttatggctgacggagaagaatggtttgtatccaaacctgagcaagtcctatgcaaacaacaaagagaaagaagtccttgtactgtggggtgttcatcacccgcctaacataggagaccaaagggccctctatcatacagaaaatgcttatgtctctgtagtgtcttcacattatagcagaagattcaccccagaaatagccaaaagacccaaggtgagagatcaggaaggaagaatcaactactactggactctgctggaacccggggatacaataatatttgaggcaaatggaaatctaatagcgccaaggtttgctttcgcactgagtagaggctttggatcaggaatcatcacctcaaatgcaccaatggacaaatgtgatgcgaagtgtcaaacacctcagggagctataaacagcagtcttcctttccagaatgtacacccagtcacaataggagagtgtccaaagtatgtcaggagtacaaaattaagaatggttacaggactaaggaacatcccatccattcaatccagaggtttgtttggagccattgccggtttcattgaaggggggtggactggaatggtagatggttggtatggttatcaccatcagaatgagcaaggatctgggtatgctgcagatcaaaaaagcacacaaaatgccattaacgggattacaaacaaggtgaattctgtaattgagaaaatgaacactcaattcacagctgtgggcaaagaattcaacaaattggaaagaaggatggaaaatttaaataaaaaggttgatgatgggtttctagacatttggacatataacgcagaattgttggttctactggaaaatgaaaggactttggacttccatgactccaacgtgaagaatctgtatgagaaagtaaaaagccaattaaagaataatgccaaagaaataggaaacgggtgttttgaattctatcacaagtgtaacgatgaatgcatggagagtgtgaaaaatggaacttatgactatccaaaatattccgaagaatcaaagttgaacagggagaaaattgatggagtgaaattggaatcaatgggagtctatcagattctggcgatctactcaacagtcgccagttccttggttcttttggtctccctgggggcaatcagcttctggatgtgttccaatgggtctttgcagtgtagaatatgcatctaa

SEQ ID NO: 32504 - RNA, 1701 nt, synthetic construct
  misc_feature 1..1701: note = hemagglutinin__InfluenzaA__ABV82562
  source 1..1701: mol_type = other RNA
atgaagactatcattgctttgagctacattttatgtctggttttcgctcaaaaacttcctggaaatgacaacagcacggcaacgctgtgccttgggcaccatgcagtaccaaacggaacgatagtgaaaacaatcacgaatgaccaaattgaagttactaatgctactgagctggttcagagttcctcaacaggtgaaatatgcgacagtcctcatcagatccttgatggagaaaactgcacactaatagatgctctattgggagaccctcagtgtgatggcttccaaaataagaaatgggacctttttgttgaacgcagcaaagcctacagcaactgttacccttatgatgtgccggattatgcctcccttaggtcactagttgcctcatccggcacactggagtttaacaatgaaagcttcaattggactggagtcactcaaaacggaacaagctctgcttgcataagaagatctaataacagtttctttagtagattgaattggttgacccacttaaaattcaaatacccagcattgaacgtgactatgccaaacaatgaaaaatttgacaaattgtacatttggggggttcaccacccgggtacggacaatgaccaaatcttcctgtatgctcaagcatcaggaagaatcacagtctctaccaaaagaagccaacaaactgtaatcccgaatatcggatctagacccagagtaaggaatatccccagcagaataagcatctattggacaatagtaaaaccgggagacatacttttgattaacagcacagggaatctaattgctcctaggggttacttcaaaatacgaagtgggaaaagctcaataatgagatcagatgcacccattggcaaatgcaattctgaatgcatcactccaaatggaagcattcccaatgacaaaccattccaaaatgtaaacaggatcacatatggggcctgtcccagatatgttaagcaaaacactctgaaattggcaacagggatgcgaaatgtaccagagaaacaaactagaggcatatttggcgcaatcgcgggtttcatagaaaatggttgggagggaatggtggatggttggtacggtttcaggcatcaaaattctgagggaataggacaagcagcagatctcaaaagcactcaagcagcaatcgatcaaatcaatgggaagctgaataggttgatcgggaaaaccaacgagaaattccatcagattgaaaaagaattctcagaagtcgaagggaggattcaggaccttgagaaatatgttgaggacaccaaaatagatctctggtcatacaacgcggagcttcttgttgccctggagaaccaacatacaattgatctaactgactcagaaatgaacaaactgtttgaaaaaacaaagaagcaactgagggaaaatgctgaggatatgggcaatggttgtttcaaaatataccacaaatgtgacaatgcctgcataggatcaatcagaaatggaacttatgaccacgatgtatacagagatgaagcattaaacaaccggttccagatcaagggcgttgagctgaagtcaggatacaaagattggatcctatggatttcctttgccatatcatgttttttgctttgtgttgctttgttggggttcatcatgtgggcctgccaaaaaggcaacattaggtgcaacatttgcatttga

SEQ ID NO: 32505 - RNA, 1701 nt, synthetic construct; identical to SEQ ID NO: 32445
  misc_feature 1..1701: note = hemagglutinin__InfluenzaA__ABW36168
  source 1..1701: mol_type = other RNA

SEQ ID NO: 32506 - RNA, 1698 nt, synthetic construct
  misc_feature 1..1698: note = hemagglutinin__InfluenzaA__ABW36179
  source 1..1698: mol_type = other RNA
atgaaagtaaaactactggttctgttatgtacatttacagctacatatgcagacacaatatgtataggctaccatgccaacaactcgaccgacactgttgacacagtacttgagaagaatgtgacagtgacacactctgtcaacctacttgaggacagtcacaatggaaaactatgtctactaaaaggaatagccccactacaattgggtaattgcagcgttgccggatggatcttaggaaacccagaatgcgaattactgatttccaaggaatcatggtcctacattgtagagacaccaaatcctgagaatggaacatgttacccagggtatttcgccgactatgaggagctgagagagcaattgagttcagtatcttcatttgagaggttcgaaatattccccaaagagagctcatggcccaaccacaccgtaaccggagtatcagcatcatgctcccataacgggaaaagcagtttttacagaaatttgctatggctgacggggaagaatggtttgtatccaaacctgagcaagtcctatgcaaacaacaaagagaaagaagtccttgtactgtggggtgttcatcacccgcctaacataggggaccaaagggccctctatcatacagaaaatgcttatgtctctgtagtgtcttcacattatagcagaagattcaccccagaaatagccaaaagacccaaggtgagagatcaggaaggaagaatcaactactactggactctgcttgaacccggggatacaataatatttgaggcaaatggaaatctaatagcgccaaggtttgctttcgcactgagtagaggctttggatcaggaatcatcacctcaaatgcaccaatggatgaatgtgatgcgaaatgtcaaacacctcagggagctataaacagcagtcttccgttccagaatgtacacccagtcacaataggagagtgtccaaagtatgtcaggagtacaaaattaagaatggttacaggactaaggaacatcccatccattcaatccagaggtttgtttggagccattgccggtttcattgaaggggggtggactggaatggtagatggatggtatggttaccaccatcagaatgagcaaggatctgggtatgctgctgatcaaaaaagcacacaaaatgccattaacgggattacaaacaaggtgaattctgtaattgagaaaatgaacactcaattcacagctgtgggcaaagaattcaacaaattggaaagaaggatggaaaacttaaataaaaaagttgatgatgggtttctagacatttggacatataacgcagaattgttggttctactggaaaatgaaaggactttggacttccatgactccaacgtgaagaatctgtatgagaaagtaaaaagccaattaaagaataatgccaaagaaataggaaacgggtgttttgaattctatcacaagtgtaacgatgaatgcatggagagtgtgaaaaatggaacttatgactatccaaaatattccgaagaatcaaagttgaacagggagaaaattgatggagtgaaattggaatcaatgggagtctatcagattttggcgatctactcaacagtcgccagttccctggttcttttggtctccctgggggcaatcagcttctggatgtgttccaatgggtctttgcagtgtagaatatgcatctaa

SEQ ID NO: 32507 - RNA, 1698 nt, synthetic construct; identical to SEQ ID NO: 32461
  misc_feature 1..1698: note = hemagglutinin__InfluenzaA__ABW36190
  source 1..1698: mol_type = other RNA

SEQ ID NO: 32508 - RNA, 1698 nt, synthetic construct
  misc_feature 1..1698: note = hemagglutinin__InfluenzaA__ABW36201
  source 1..1698: mol_type = other RNA
atgaaagtaaaactactggttctgttatgtacatttacagctacatatgcagacacaatatgtataggctaccatgccaacaactcgaccgacactgttgacacagtacttgagaagaatgtgacagtgacacactctgtcaacctacttgaggacagtcacaatggaaaactatgtctactaaaaggaatagccccactacaattgggtaattgcagcgttgccggatggatcttaggaaacccagaatgcgaattactgatttccaaggaatcatggtcctacattgtagagacaccaaatcctgagaatggaacatgttacccagggtatttcgccgactatgaggagctgagagagcaattgagttcagtatcttcatttgagaggttcgaaatattccccaaagagagctcatggcccaaccacaccgtaaccggagtatcagcatcatgctcccataacgggaaaagcagtttttacagaaatttgctatggctgacggggaagaatggtttgtatccaaacctgagcaagtcctatgcaaacaacaaagagaaagaagtccttgtactgtggggtgttcatcacccgcctaacataggggaccaaagggccctctatcatacagaaaatgcttatgtctctgtagtgtcttcacattatagcagaagattcaccccagaaatagccaaaagacccaaggtgagagatcaggaaggaagaatcaactactactggactctgcttgaacccggggatacaataatatttgaggcaaatggaaatctaatagcgccaaggtttgctttcgcactgagtagaggctttggatcaggaatcatcacctcaaatgcaccaatggatgaatgtgatgcgaaatgtcaaacacctcagggagctataaacagcagtcttcctttccagaatgtacacccagtcacaataggagagtgtccaaagtatgtcaggagtacaaaattaagaatggttacaggactaaggaacatcccatccattcaatccagaggtttgtttggagccattgccggcttcattgaaggggggtggactggaatggtagatggatggtatggttatcaccatcagaatgagcaaggatctgggtatgctgctgatcaaaaaagcacacaaaatgccattaacgggattacaaacaaggtgaattctgtaattgagaaaatgaacactcaattcacagctgtgggcaaagaattcaacaaattggaaagaaggatggaaaacttaaataaaaaagttgatgatgggtttctagacatttggacatataacgcagaattgttggttctactggaaaatgaaaggactttggacttccatgactccaacgtgaagaatctgtatgagaaagtaaaaagccaattaaagaataatgccaaagaaataggaaacgggtgttttgaattctatcacaagtgtaacgatgaatgcatggagagtgtgaaaaatggaacttatgactatccaaaatattccgaagaatcaaagttgaacagggaaaaaattgatggagtgaaattggaatcaatgggagtctatcagattttggcgatctactcaacagtcgccagttccctggttcttttggtctccctgggggcaatcagcttctggatgtgttccaatgggtctttgcagtgtagaatatgcatctaa

SEQ ID NO: 32509 - RNA, 1698 nt, synthetic construct
  misc_feature 1..1698: note = hemagglutinin__InfluenzaA__ABW36212
  source 1..1698: mol_type = other RNA
atgaaagtaaaactactggttctgttatgtacatttacagctacatatgcagacacaatatgtataggctaccatgccaacaattcaaccgacactgttgacacagtgcttgagaagaatgtgacagtgacacactctgtcaacctacttgaggacagtcacaatggaaaactatgtctactaaaaggaatagccccactacaattgggtaattgcagcgttgccggatggatcttaggaaacccagaatgcgaattactgatttccaaggaatcatggtcctacattgtagaaacaccaaatcctgagaatggaacatgttacccagggtatttcgccgactatgaggagctgagggagcaattgagttcagtatcttcatttgagaggttcgaaatattccccaaagagaactcatggcccaaccacaccgtaaccggagtatcagcatcatgctcccataacgggaaaagcagtttttacagaaatttgctatggctgacggggaagaatggtttgtacccaaacctgagcaagtcctatgcaaacaacaaagagaaagaagtccttgtactatggggtgttcatcacccgcctaacataggggaccaaagggccctctatcatacagaaaatgcttatgtctctgtagtgtcttcacattatagcagaagattcaccccagaaatagccaaaagacccaaggtgagagatcaggaaggaagaatcaactactactggactctgctggaacccggggatacaataatatttgaggcaaatggaaatctaatagcgccaaggtttgctttcgcactgagtagaggcttgggatcaggaatcatcacctcaaatgcaccaatggatgaatgtgatgcgaaatgtcaaacacctcagggagctataaacagcagtcttcctttccagaatgtacacccagtcacaataggagagtgtcccaagtatgtcaggagtgcaaaattaaggatggttacaggactaaggaacatcccatccattcaatccagaggtttgtttggagccattgccggtttcattgaaggggggtggactggaatggtagatggttggtatggttatcatcatcagaatgagcaaggatctgggtatgctgcagatcaaaaaagcacacaaaatgccattaacgggattacaaacaaggtgaattctgtaattgagaaaatgaacactcaattcacagctgtgggcaaagaattcaacaaattggaaagaaggatggaaaacttaaataaaaaagttgatgatgggtttctagacatttggacctataatgcagaattgttggttctactggaaaatgaaaggactttggatttccatgactccaacgtgaagaatctgtatgagaaagtaaaaggccaattaaagaataatgccaaagaaataggaaacgggtgttttgaattctatcacaagtgtaacgatgaatgcatggagagtgtgaaaaatggaacttatgactatccaaaatattccgaagaatcaaagttgaacagggagaaaattgatggagtgaaattggaatcaatgggagtctatcagattctggcgatctactcaacagtcgccagttccctggttcttttggtctccctgggggcaatcagcttctggatgtgttccaatgggtctttgcagtgtagaatatgcatctaa

SEQ ID NO: 32510 - RNA, 1698 nt, synthetic construct; identical to SEQ ID NO: 32426
  misc_feature 1..1698: note = hemagglutinin__InfluenzaA__ABW36223
  source 1..1698: mol_type = other RNA

SEQ ID NO: 32511 - RNA, 1698 nt, synthetic construct; identical to SEQ ID NO: 32426
  misc_feature 1..1698: note = hemagglutinin__InfluenzaA__ABW36245
  source 1..1698: mol_type = other RNA

SEQ ID NO: 32512 - RNA, 1698 nt, synthetic construct
  misc_feature 1..1698: note = hemagglutinin__InfluenzaA__ABW36267
  source 1..1698: mol_type = other RNA
atgaaagtaaaactactgattctgttatgtacatttacagctacatatgcagacacaatatgtataggctaccatgccaacaactcgaccgacactgttgacacagtacttgagaagaatgtgacagtgacacattctgtcaacctacttgaggacagtcacaatggaaaactatgtctactaaaaggaatagccccactacaattgggtaattgcagcgttgccggatggatcttaggaaacccagaatgcgaattactgatttccaaggaatcatggtcctacattgtagagacaccaaatcctgagaatggaacatgttacccagggtatttcgccgactatgaggagctgagagagcaattgagttcagtatcttcatttgagaggttcgaaatattccccaaagagagctcatggcccaaccacaccgtaaccggagtatcagcatcatgctcccataacgggaaaagcagtttttacagaaatttgctatggctgacggggaagaatggtttgtatccaaacctgagcaagtcctatgcaaacaacaaagagaaagaagtccttgtactgtggggtgttcatcacccgcctaacataggggaccaaagggccctctatcatacagaaaatgcttatgtctctgtagtgtcttcacattatagcagaagattcaccccagaaatagccaaaagacccaaggtgagagatcaggaaggaagaatcaactactactggactctgcttgaacccggggatacaataatatttgaggcaaatggaaatctaatagcgccaaggtttgctttcgcactgagtagaggctttggatcaggaatcatcacctcaaatgcaccaatggatgaatgtgatgcgaaatgtcaaacacctcagggagctataaacagcagtcttcctttccagaatgtacacccagtcacaataggagagtgtccaaagtatgtcaggagtacaaaattaagaatggttacaggactaaggaacatcccatccattcaatccagaggtttatttggagccattgccggtttcattgaaggggggtggactggaatggtagatggttggtatggttatcaccatcagaatgagcaaggatctgggtatgctgcagatcaaaaaagcacacaaaatgccattaacgggattacaaacaaggtgaattctgtaattgagaaaatgaacactcaattcacagctgtgggcaaagaattcaacaaattggaaagaaggatggaaaacttaaataaaaaagttgatgatgggtttctagacatttggacatataacgcagaattgttggttctactggaaaatgaaaggactttggacttccatgactccaacgtgaagaatctgtatgagaaagtaaaaagccaattaaagaataatgccaaagaaataggaaacgggtgttttgaattctatcacaagtgtaacgatgaatgcatggagagtgtgaaaaatggaacttatgactatccaaaatattccgaagaatcaaagttgaacagggagaaaattgatggagtgaaattggaatcaatgggagtctatcagattttggcgatctactcaacagtcgccagttccctggttcttttggtctccctgggggcaatcagcttctggatgtgttccaatgggtctttgcagtgtagaatatgcatctaa

SEQ ID NO: 32513 - RNA, 1698 nt, synthetic construct; identical to SEQ ID NO: 32429
  misc_feature 1..1698: note = hemagglutinin__InfluenzaA__ABW36278
  source 1..1698: mol_type = other RNA

SEQ ID NO: 32514 - RNA, 1698 nt, synthetic construct
  misc_feature 1..1698: note = hemagglutinin__InfluenzaA__ABW36289
  source 1..1698: mol_type = other RNA
atgaaattaaaactactggttctgttatgtacatttacagctacatatgcagacacaatatgtataggctaccatgccaacaactcgaccgacactgttgacacagtacttgagaagaatgtgacagtgacacactctgtcaacctacttgaggacagtcacaatggaaaactatgtctactaaaaggaatagccccactacaattgggtaattgcagcgttgccggatggatcttaggaaacccagaatgcgaattactgatttccaaggaatcatggtcctacattgtagagacaccaaatcctgagaatggaacatgttacccagggtatttcgccgactatgaggagctgagagagcaattgagttcagtatcttcatttgaaaggttcgaaatattccccaaagagagctcatggcccaaccacaccgtaaccggagtatcagcatcatgctcccataacgggaaaagcagtttttacagaaatttgctatggctgacggggaagaatggtttgtatccaaacctgagcaagtcctatgcaaacaacaaagagaaagaagtccttgtactgtggggtgttcatcacccgcctaacataggggaccaaagggccctctatcatacagaaaatgcttatgtctctgtagtgtcttcacattatagcagaagattcaccccagaaatagccaaaagacccaaggtgagggatcaggaaggaagaatcaactactactggactctgcttgaacccggggatacaataatatttgaggcaaatggaaatctaatagcgccaaggtttgctttcgcactgagtagaggctttggatcaggaatcatcacctcaaatgcaccaatggatgaatgtgatgcgaaatgtcaaacacctcagggagctataaacagcagtcttcctttccagaatgtacacccagtcacaataggagagtgtccaaagtatgtcaggagtacaaaattaagaatggttacaggactaaggaacatcccatccattcaatccagaggtttgtttggagccattgccggtttcattgaaggggggtggactggaatggtagatggttggtatggttatcaccatcagaatgagcaaggatctgggtatgctgctgatcaaaaaagcacacaaaatgccattaacgggattacaaacaaggtgaattctgtaattgagaaaatgaacactcaattcacagctgtgggcaaagaattcaacaaattggaaagaaggatggaaaacttaaataaaaaagttgatgatgggtttctagacatttggacatataacgcagaattgttggttctactggaaaatgaaaggactttggacttccatgactccaacgtgaagaatctgtatgagaaagtaaaaagccaattaaagaataatgccaaagaaataggaaacgggtgttttgaattctatcacaagtgtaacgatgaatgcatggagagtgtgaaaaatggaacttatgactatccaaaatattccgaagaatcaaagttgaacagggagaaaattgatggagtgaaattggaatcaatgggagtctatcagattttggcgatctactcaacagtcgccagttccctggttcttttggtctccctgggggcaatcagcttctggatgtgttccaatgggtctttgcagtgtagaatatgcatctaa

SEQ ID NO: 32515 - RNA, 1698 nt, synthetic construct
  misc_feature 1..1698: note = hemagglutinin__InfluenzaA__ABW36300
  source 1..1698: mol_type = other RNA
atgaaagtaaaactacttgttctgttatgtacatttacagctacatatgcagacacaatatgtataggctaccatgccaacaactcgactgacactgttgacacagtacttgagaagaatgtgacagtgacacactctgtcaacctacttgaggacagtcacaatggaaaactatgtctactaaaaggaatagccccactacaattgggtaattgcagcgttgccggatggatcttaggaaacccagaatgcgaattactgatttccaaggaatcatggtcctacattgtagaaacaccaaatcctgagaatggaacatgttacccaggatatttcgccgactatgaggagctgagggagcaattgagttcagtatcttcatttgagaggttcgaaatattccccaaagagagctcatggcccaaccacaccgtaaccggagtatcagcatcatgctcccataacggggaaagcagtttttacagaaatttgttatggctgacggggaagaatggtttgtatccaaacctgagcaagtcctatgcaaacaacaaagagaaagaagtccttgtactgtggggtgttcatcacccgcccaacataggagaccaaagggccctctatcatacagaaaatgcttatgtctctgtagtgtcttcacattatagcagaagattcaccccagaaatagccaaaagacccaaggtgagagatcaggaaggaagaatcaactactactggactctgctggaacccggggatacaataatatttgaggcaaatggaaatctaatagcgccaaggtttgctttcgcactgagtagaggctttggatcaggaatcatcacctcaaatgcaccaatggataaatgtgatgcgaagtgtcaaacacctcagggagctataaacagcagtcttcctttccagaatgtacacccagtcacaataggagagtgtccaaagtatgtcaggagtacaaaattaagaatggttacaggactaaggaacatcccatccattcaatccagaggtttgtttggagccattgccggtttcattgaaggggggtggactggaatggtagatggttggtatggttatcaccatcagaatgagcaaggatctgggtatgctgcagatcaaaaaagcacacaaaatgccattaacgggattacaaacaaggtgaattctgtaattgagaaaatgaacactcaattcacagctgtgggcaaagaattcaacaaattggaaagaaggatggaaaatttaaataaaaaggttgatgatgggtttctagacatttggacatataacgcagaattgttggttctactggaaaatgaaaggactttggacttccatgactccaacgtgaagaatctgtatgagaaagtaaaaagccaattaaagaataatgccaaagaaatagggaacgggtgttttgaattctatcacaagtgtaacgatgaatgcatggagagtgtgaaaaatggaacttatgactatccaaaatattccgaagaatcaaagttgaacagggagaaaattgatggagtgaaattggaatcaatgggagtctatcagattctggcgatctactcaacagtcgccagttccttggttcttttggtctccctgggggcaatcagcttctggatgtgttccaatgggtctttgcagtgtagaatatgcatctaa

SEQ ID NO: 32516 - RNA, 1701 nt, synthetic construct
  misc_feature 1..1701: note = hemagglutinin__InfluenzaA__ABW36311
  source 1..1701: mol_type = other RNA
atgaaagcaaaactactggtcctgttatgtgcactttcagctacagatgcagacacaatatgtataggctaccatgcgaacaactcaaccgacactgttgacacagtactcgaaaagaacgtgacagtgacacactctgtcaacctacttgaggacagtcacaacggaaaactatgcagactaaaaggaatagctccactacaattggggaaatgcagcattgccggatggatcttaggaaacccagaatgcgaatcactgttttctaagaaatcatggtcctacattgcagaaacaccaaactccgagaatggaacatgttacccaggatatttcgccgactatgaggaactgagggagcaattgagttcagtatcatcattcgagagattcgaaatattccccaaggaaagatcatggcccaaacacaacgtaaccagaggagtaacggcatcatgctcccataaggggaaaagcagtttttacagaaatttgctatggctgacggagaaaaatggctcgtacccaaatctgagcaagtcctatgtgaacaacaaagagaaagaagtccttgtactatggggtgttcatcacccgtctaacatagaggaccaaaagaccatctatcggaaagaaaatgcttatgtctctgtagtgtcttcaaattataacaggagattcaccccagaaatagcaaaaagacccaaagtaagagatcaagaagggagaattaactactactggactctgctggaacccggggacacaataatatttgaggcaaatggaaatctaatagcgccatggtatgctttcgcactgagtagaggctttgggtcaggaatcatcacctcaaacgcatcgatggatgaatgtgacacgaagtgtcaaacaccccagggagctataaacagtagccttcctttccagaatgtacacccagtcacaataggagagtgcccaaaatacgtcaggagtacaaaattaaggatggttacaggactaagaaacatcccatccattcaatccagaggtctgtttggagccattgccggtttcattgaagggggatggactggaatgatagatggatggtatggttatcatcatcagaatgaacagggatctggctatgctgcggatcaaaaaagcacacaaaatgccattaacgggattacaaacaaggtgaactctgttatcgagaaaatgaacactcaattcacagctgtgggtaaagaattcaacaaattagaaaaaaggatggaaaacttaaataaaaaagttgatgatggatttctggacatttggacatataatgcagaattgttggttctactggaaaatgaaaggactttggattctcatgactcaaatgtgaagaatctgtatgagaaagtaaaaagccaattaaagaataatgccaaagaaataggaaacgggtgttttgaattctaccacaagtgtaacaatgaatgcatggaaagtgtaaaaaatggaacttatgactatccaaaatattcagaggaatcaaagttaaacagggaaaaaattgatggagtgaaattggaatcaatgggagtctatcagattctggcgatctactcaactgtcgccagttcactggtgcttttggtctccctgggggcaatcagcttctggatgtgttctaatgggtctttgcagtgcagaatatgcatctga

SEQ ID NO: 32517 - RNA, 1701 nt, synthetic construct
  misc_feature 1..1701: note = hemagglutinin__InfluenzaA__ABW38363
  source 1..1701: mol_type = other RNA
atgaagactatcattgctttgagctacattctatgtctggttttcgctcaaaaacttcccggaaatgacaacagcacggcaacgctgtgccttgggcaccatgcagtaccaaacggaacgatagtgaaaacaatcacgaatgaccaaattgaagttactaatgctactgagctggttcagagttcatcaacaggtgaaatatgcgacagtcctcatcagatccttgatggagaaaactgcacactaatagatgctctattgggagaccctcagtgtgatggcttccaaaataagaaatgggacctttttgttgaacgcagcaaagcctacagcaactgttacccttatgatgtgccggattatgcctcccttaggtcactagttgcctcatccggcacactggagtttaacaatgaaagcttcaattggactggagtcactcaaaatggaacaagctctgcttgcaaaaggagatctaataacagtttctttagtagattgaattggttgacccacttaaaattcaaatacccagcattgaacgtgactatgccaaacaatgaaaaatttgacaaattgtacatttggggggttcaccacccgggtacggacaatgaccaaatcttcctgtatgctcaagcatcaggaagaatcacagtctctaccaaaagaagccaacaaactgtaatcccgaatatcggatctagacccagagtaaggaatatccccagcagaataagcatctattggacaatagtaaaaccgggagacatacttttgattaacagcacagggaatctaattgctcctaggggttacttcaaaatacgaagtgggaaaagctcaataatgagatcagatgcacccattggcaaatgcaattctgaatgcatcactccaaatggaagcattcccaatgacaaaccatttcaaaatgtaaacaggatcacatatggggcctgtcccagatatgttaagcaaaacactctgaaattggcaacagggatgcgaaatgtaccagagaaacaaactagaggcatatttggcgcaatcgcgggtttcatagaaaatggttgggagggaatggtggatggttggtacggtttcaggcatcaaaattctgagggaataggacaagcagcagatctcaaaagcactcaagcagcaatcgatcaaatcaatgggaagctgaataggttgatcgggaaaaccaacgagaaattccatcagattgaaaaagaattctcagaagtagaagggagaattcaggacctcgagaaatatgttgaggacactaaaatagatctctggtcatacaacgcggagcttattgttgccctggagaaccaacatacaattgatctaactgactcagaaatgaacaaactgtttgaaagaacaaagaagcaactgagggaaaatgctgaggatatgggcaatggttgtttcaaaatataccacaaatgtgacaatgcctgcataggatcaatcagaaatggaacttatgaccatgatgtatacagagatgaagcattaaacaaccggttccagatcaaaggtgttgagctgaagtcaggatacaaagattggatcctatggatttcctttgccatatcatgttttttgctttgtgttgctttgttggggttcatcatgtgggcctgccaaaaaggcaacattaggtgcaacatttgcatttga

SEQ ID NO: 32518 - RNA, 1698 nt, synthetic construct
  misc_feature 1..1698: note = hemagglutinin__InfluenzaA__ABW39777
  source 1..1698: mol_type = other RNA
atgaaagtaaaactactggttctgttatgtacatttacagctacatatgcagacacaatatgtataggctaccatgccaacaattcaaccgacactgttgacacagtgcttgagaagaatgtgacagtgacacactctgtcaacctacttgaggacagtcacaatggaaaactatgtctactaaaaggaatagccccactacaattgggtaattgcagcgttgccggatggatcttaggaaacccagaatgcgaattactgatttccaaggaatcatggtcctacattgtagaaacaccaaatcctgagaatggaacatgttacccagggtatttcgccgactatgaggagctgagggagcaattgagttcagtatcttcatttgagaggttcgaaatattccccaaagagaactcatggcccaaccacaccgtaaccggagtatcagcatcatgctcccataacgggaaaagcagtttttacagaaatttgctatggctgacggggaagaatggtttgtacccaaacctgagcaagtcctatgcaaacaacaaagagaaagaagtccttgtactatggggtgttcatcacccgcctaacataggggaccaaagggccctctatcatacagaaaatgcttatgtctctgtagtgtcttcacattatagcagaagattcaccccagaaatagccaaaagacccaaggtgagagatcaggaaggaagaatcaactactactggactctgctggaacccggggatacaataatatttgaggcaaatgggaatctaatagcgccaaggtttgctttcgcactgagtagaggcttgggatcaggaatcatcacctcaaatgcaccaatggatgaatgtgatgcgaaatgtcaaacacctcagggagctataaacagcagtcttcctttccagaatgtacacccagtcacaataggagagtgtcccaagtatgtcaggagtgcaaaattaaggatggttacaggactaaggaacatcccatccattcaatccagaggtttgtttggagccattgccggtttcattgaaggggggtggactggaatggtagatggttggtatggttatcatcatcagaatgagcaaggatctgggtatgctgcagatcaaaaaagcacacaaaatgccattaacgggattacaaacaaggtgaattctgtaattgagaaaatgaacactcaattcacagctgtgggcaaagaattcaacaaattggaaagaaggatggaaaacttaaataaaaaagttgatgatgggtttctagacatttggacctataatgcagaattgttggttctactggaaaatgaaaggactttggatttccatgactccaacgtgaagaatctgtatgagaaagtaaaaagccaattaaagaataatgccaaagaaataggaaacgggtgttttgaattctatcacaagtgtaacgatgaatgcatggagagtgtgaaaaatggaacttatgactatccaaaatattccgaagaatcaaagttaaacagggagaaaattgatggagtgaaattggaatcaatgggagtctatcagattctggcgatctactcaacagtcgccagttccctggttcttttggtctccctgggggcaatcagcttctggatgtgttccaatgggtctttgcagtgtagaatatgcatctaa

SEQ ID NO: 32519 - RNA, 1698 nt, synthetic construct; identical to SEQ ID NO: 32418
  misc_feature 1..1698: note = hemagglutinin__InfluenzaA__ABW39806
  source 1..1698: mol_type = other RNA

SEQ ID NO: 32520 - RNA, 1698 nt, synthetic construct
  misc_feature 1..1698: note = hemagglutinin__InfluenzaA__ABW39817
  source 1..1698: mol_type = other RNA
atgaaagtaaaactacttgttctgttatgtacatttacagctacatatgcagacacaatatgtataggctaccatgccaacaactcgactgacactgttgacacagtacttgagaagaatgtgacagtgacacactctgtcaacctacttgaggacagtcacaatggaaaactatgtctactaaaaggaatagccccactacaattgggtaattgcagcgttgccggatggatcttaggaaacccagaatgcgaattactgatttccaaggaatcatggtcctacattgtagaaacaccaaatcctgagaatggaacatgttacccaggatatttcgccgactatgaggagctgagggagcaattgagttcagtatcttcatttgagaggttcgaaatattccccaaagagagctcatggcccaaccacaccgtaaccggagtatcagcatcatgctcccataacggggaaagcagtttttacagaaatttgttatggctgacggggaagaatggtttgtatccaaacctgagcaagtcctatgcaaacaacaaagagaaagaagtccttgtactgtggggtgttcatcacccgcctaacataggagaccaaagggccctctatcatacagaaaatgcttatgtctctgtagtgtcttcacattatagcagaagattcaccccagaaatagccaaaagacccaaggtgagagatcaggaaggaagaatcaactactactggactctgctggaacccggggatacaataatatttgaggcaaatggaaatctaatagcgccaaggtttgctttcgcactgagtagaggctttggatcaggaatcatcacctcaaatgcaccaatggataaatgtgatgcgaagtgtcaaacacctcagggagctataaacagcagtcttcctttccagaatgtacacccagtcacaataggagagtgtccaaaatatgtcaggagtacaaaattaagaatggttacaggactaaggaacatcccatccattcaatccagaggtttgtttggagccattgccggtttcattgaaggggggtggactggaatggtagatggttggtatggttatcaccatcagaatgagcaaggatctgggtatgctgcagatcaaaaaagcacacaaaatgccattaacgggattacaaacaaggtgaattctgtaattgagaaaatgaacactcaattcacagctgtgggcaaagaattcaacaaattggaaagaaggatggaaaatttaaataaaaaggttgatgatgggtttctagacatttggacatataatgcagaattgttggttctactggaaaatgaaaggactttggacttccatgactccaacgtgaagaatctgtatgagaaagtaaaaagccaattaaagaataatgccaaagaaataggaaacgggtgttttgaattctatcacaagtgtaacgatgaatgcatggagagtgtgaaaaatggaacttatgactatccaaaatattccgaagaatcaaagttgaacagggagaaaattgatggagtgaaattggaatcaatgggagtctatcagattctggcgatctactcaacagtcgccagttccttggttcttttggtctccctgggggcaatcagcttctggatgtgttccaatgggtctttgcagtgtagaatatgcatctaa

SEQ ID NO: 32521 - RNA, 1698 nt, synthetic construct
  misc_feature 1..1698: note = hemagglutinin__InfluenzaA__ABW39828
  source 1..1698: mol_type = other RNA
atgaaagtaaaactactggtcctattatgcacatttacagctacatatgcagacacaatatgtatcggctaccatgccaacaactcaaccgacactgttgacacagtacttgaaaagaatgtgacagtgacacactctgtcaacctgcttgaggacaaccacaatggaaaactatgtctattaaaaggaatagccccattacaattgggtaactgcagcgttgccgggtggatcttaggaaacccagaatgcgaattactgatttccaaggagtcatggtcctacattgtagaaaaaccaaatcctgagaatggaacatgttacccagggcatttcgccgactatgaggaactgagggagcaattgagttcagtatcttcatttgagaggttcgaaatattccccaaagaaagctcatggcccaaccacaccgtaaccggagtatccgcatcatgctcccataatggggaaagcagcttttacaaaaatttgctatggctgacgggaaagaatggtttgtacccaaacctgagcaagtcctatgcaaacaacaaagagaaagaagtcctcgtactatggggtgttcatcacccgccaaacataggtgaccaaatgaccctctatcataaagaaaatgcttatgtctctgtagtgtcttcacattatagcagaaaattcaccccagaaatagccaaaagacccaaagtaagagatcaagaaggaagaatcaactactactggactctgcttgaacccggggatacaataatatttgaggcaaatggaaatctaatagcgccaagatatgctttcgcactgagtagaggctttggatcaggaatcatcaactcaaatgcaccaatggatgaatgtgatgcgaagtgccaaacacctcagggagctataaacagcagtcttcctttccagaatgtacacccagtcacaataggagaatgtccaaagtatgtcaggagtgcaaaattaaggatggttacaggactaaggaacatcccatccattcaatccagaggtttgtttggagccattgccggtttcattgaaggggggtggactggaatggtagatggttggtatggttatcatcaccagaatgagcaaggatctggctatgctgcagatcaaaaaagcacacaaaatgccattaatgggattacaaacaaggtgaattctgtaattgagaagatgaacactcaattcacagctgtgggcaaagaattcaacaaattggaaagaaggatggaaaacttaaataaaaaagttgatgacgggtttatagacgtttggacatataatgcagaactgttggttctactggaaaatgaaagaactttggatttccatgactccaatgtgaagaatttgtatgagaaagtaaaaaatcaattaaagaataatgccaaagaaataggaaatgggtgttttgaattttatcacaagtgtaacgatgaatgcatggagagtgtaaaaaatggaacttatgactatccaaaatattccgaagaatcaaagttaagcagggagaaaattgatggagtgaaattggaatcaatgggagtctatcagattctggcgatctactcaacagtcgccagttctctggttcttttggtctccctgggggcaatcagcttctggatgtgttccaatgggtctttgcagtgtagaatatgcatctaa

SEQ ID NO: 32522 - RNA, 1698 nt, synthetic construct
  misc_feature 1..1698: note = hemagglutinin__InfluenzaA__ABW39839
  source 1..1698: mol_type = other RNA
atgaaagtaaaactacttgttctgttatgtacatttacagctacatatgcagacacaatatgtataggctaccatgccaacaactcgaccgacactgttgacacagtacttgagaagaatgtgacagtgacacactctgtcaacctacttgaggacagtcacaatggaaaactatgtctactaaaaggaatagccccactacaattgggtaattgcagcgttgccggatggatcttaggaaacccagaatgcgaattactgatttccaaggaatcatggtcctacattgtagaaacaccaaatcctgagaatggaacatgttacccaggatatttcgccgactatgaggagctgagggagcaattgagttcagtatcttcatttgagaggttcgaaatattccccaaagagagctcatggcccaaccacaccgtaaccggagtatcagcatcatgctcccataacgggaaaagcagtttttacagaaatttgctatggctgacggggaagaatggtttgtatccaaacctgagcaagtcctattcaaacaacaaagagaaagaagtccttgtactgtggggtgttcatcacccgcctaacataggggaccaaagggccctctatcatacagaaaatgcttatgtctctgtagtgtcttcacattatagcagaagattcaccccagaaatagccaaaagacccaaggtgagagatcaggaaggaagaatcaactactactggactctgctggaacccggggatacaataatatttgaggcaaatggaaatctaatagcgccaaggtttgctttcgcactgagtagaggctttggatcaggaatcatcacctcaaatgcaccaatgggtgaatgtgatgcgaagtgtcaaacacctcagggagctataaacagtagtcttcctttccagaatgtacatccagtcacaataggagagtgtccaaagtatgtcaggagtgcaaaattaagaatggttacaggactaaggaacatcccatccattcaatccagaggtttgtttggagccattgccggtttcattgaaggggggtggactggaatggtagatggttggtatggttatcaccatcagaatgagcaaggatctgggtatgctgcagatcaaaaaagcacacaaaatgccattaacgggattacaaacaaggtgaattctgtaattgagaaaatgaacactcaattcacagctgtgggcaaagaattcaacaaattggaaagaaggatggaaaacttaaataaaaaggttgatgatgggtttctagacatttggacatataacgcagaattgttggttctactggaaaatgaaaggactttggacttccatgactccaacgtgaagaatctgtatgagaaagtaaaaagccaattaaagaataatgccaaagaaataggaaacgggtgttttgaattctatcacaagtgtaacgatgaatgcatggagagtgtgagaaatggaacttatgactatccaaaatattccgaagaatcaaagttgaacagggagaaaattgatggagtgaaattggaatcaatgggagtctatcagattctggcgatctactcaacagtcgccagttccctggttcttttggtctccctgggggcaatcagcttctggatgtgttccaatgggtctttgcagtgtagaatatgcatctaa

SEQ ID NO: 32523 - RNA, 1698 nt, synthetic construct
  misc_feature 1..1698: note = hemagglutinin__InfluenzaA__ABW39850
  source 1..1698: mol_type = other RNA
atgaaagtaaaactactggtcctgttatgcacatttacagctacaaatgcagacacaatatgtataggctaccatgctaacaactcgaccgacactgttgacacagtacttgaaaagaatgtgacagtgacacactctgtcaatctgcttgagaacagtcacaatggaaaactatgtctattaaaaggaatagccccactacaattgggtaattgcagcgttgccgggtggatcttaggaaacccagaatgcgaattactgatttccaaggagtcatggtcctacattgtagaaaaaccaaatcctgagaatggaacatgttacccagggcatttcgctgactatgaggaactgagggagcaattgagttcagtatcttcatttgagaggttcgaaatattccccaaagaaagctcatggcccaatcacaccgtaaccggagtgtcagcatcatgctcccataatggggaaagcagtttttacagaaatttgctatggctgacggggaagaatggtttgtacccaaacctgagcaagtcctatgcaaacaacaaagaaaaagaagtccttgtactatggggtgttcatcacccgccaaacataggtgaccaaaaggccctctatcatacagaaaatgcttatgtctctgtagtgtcttcacattatagcagaaaattcaccccagaaatagccaaaagacccaaagtaagagatcaagaaggaagaatcaactactactggactctgcttgaacccggggatacaataatatttgaggcaaatggaaatctaatagcgccaagatatgctttcgcactgagtagaggctttggatcaggaatcatcaactcaaatgcaccaatggataaatgtgatgcgaagtgccaaacacctcagggagctataaacagcagccttcctttccagaatgtacacccagtcacaataggagagtgtccaaagtatgtcaggagtgcaaaattaaggatggttacaggactaaggaacatcccatccattcaatccagaggtttgtttggagccattgccggtttcattgaaggggggtggactggaatggtagatggttggtatggttatcatcatcagaatgagcaaggatctggctatgctgcagatcaaaaaagcacacaaaatgccattaatgggattacaaacaaggtgaattctgtaattgagaaaatgaacactcaattcacagcagtgggcaaagaattcaacaaattggaaagaaggatggaaaacttgaataaaaaagttgatgatggatttatagacatttggacatataatgcagaactgttggttctactggaaaatgaaaggactttggatttccatgactccaatgtgaagaatctgtatgagaaagtaaaaggccagttaaagaataatgccaaagaaataggaaatgggtgttttgaattctatcacaagtgtaacgatgaatgcatggagagtgtaaagaatggaacttatgactatccaaaatattccgaagaatcaaagttaaacagggagaaaattgatggagtgaaattggaatcaatgggagtctatcagattctggcgatctactcaacagtcgccagttctctggttcttttggtctccctgggggcaatcagcttctggatgtgttccaatgggtctttgcagtgtagaatatgcatctaa

SEQ ID NO: 32524 - RNA, 1698 nt, synthetic construct
  misc_feature 1..1698: note = hemagglutinin__InfluenzaA__ABW39861
  source 1..1698: mol_type = other RNA
atgaaagtaaaactactggttctgttatgtacatttacagctacatatgcagacacaatatgtataggctaccatgccaacaactcgaccgacactgttgacacagtacttgagaagaatgtaacagtgacacactctgtcaacctacttgaggacagtcacaatggaaaactatgtctactaaaaggaatagccccactacaattgggtaattgcagcgttgccggatggatcttaggaaacccagaatgcgaattactgatttccaaggaatcatggtcctacattgtagagacaccaaatcctgagaatggaacatgttacccagggaatttcgccgactatgaggagctgagagagcaattgagttcagtatcttcatttgagaggttcgaaatattccccaaagagagctcatggcccaaccacaccgtaaccggagtatcagcatcatgctcccataacgggaaaagcagtttttacagaaatttgctatggctgacggggaagaatggtttgtatccaaacctgagcaagtcctatgcaaacaacaaagagaaagaagtccttgtactgtggggtgttcatcacccgcctaacataggggaccaaagggccctctatcatacagaaaatgcttatgtctctgtagtgtcttcacattatagcagaagattcaccccagaaatagccaaaagacccaaggtgagagatcaggaaggaagaatcaactactactggactctgcttgaacccggggatacaataatatttgaggcaaatggaaatctaatagcgccaaggtttgctttcgcactgagtagaggctttggatcaggaatcatcacctcaaatgcaccaatggatgaatgtgatgcgaaatgtcaaacacctcagggagctataaacagcagccttcctttccagaatgtacacccagtcacaataggagagtgtccaaagtatgtcaggagtgcaaaattaagaatggttacagggctaaggaacatcccatccattcaatccagaggtttgtttggagccattgccggtttcattgaaggggggtggactggaatggtagatggttggtatggttatcaccatcagaatgagcaaggatctgggtatgctgcagatcaaaaaagcacacaaaatgccattaacgggattacaaacaaggtgaattctgtaattgagaaaatgaacactcaattcacagctgtgggcaaagaattcaacaaattggaaagaaggatggaaaacttaaataaaaaagttgatgatgggtttctagacatttggacatataacgcagaattgttggttctactggaaaatgaaaggactttggacttccatgactccaacgtgaagaatctgtatgagaaagtaaaaagccaattaaagaataatgccaaagaaataggaaacgggtgttttgaattctatcacaaatgtaacgatgaatgcatggagagtgtgaaaaatggaacttatgactatccaaaatattccgaagaatcaaagttgaacagggagaaaattgatggagtgaaattggaatcaatgggagtctatcagattttggcgatctactcaacagtcgccagttccctggttcttttggtctccctgggggcaatcagcttctggatgtgttccaatgggtctttgcagtgtagaatatgcatctaa

SEQ ID NO: 32525 - RNA, 1701 nt, synthetic construct; identical to SEQ ID NO: 32445
  misc_feature 1..1701: note = hemagglutinin__InfluenzaA__ABW39872
  source 1..1701: mol_type = other RNA

SEQ ID NO: 32526 - RNA, 1698 nt, synthetic construct
  misc_feature 1..1698: note = hemagglutinin__InfluenzaA__ABW39883
  source 1..1698: mol_type = other RNA
atgaaagtaaaactactggttctgttatgtacatttacagctacatatgcagacacaatatgtataggctaccatgccaacaactcgaccgacactgttgacacagtacttgagaagaatgtgacagtgacacactctgtcaacctacttgaggacagtcacaatggaaaactatgtctactaaaaggaatagccccactacaattgggtaattgcagcgttgccggatggatcttaggaaacccagaatgcgaattactgatttccaaggaatcatggtcctacattgtagagacaccaaatcctgagaatggaacatgttacccagggtatttcgccgactatgaggagctgagagagcaattgagttcagtatcttcatttgagaggttcgaaatattccccaaagagagctcatggcccaaccacaccgtaaccggagtatcagcatcatgctcccataacgggaaaagcagtttttacagaaatttgctatggctgacggggaagaatggtttgtatccaaacctgagcaagtcctatgcaaacaacaaagagaaagaagtccttgtactgtggggtgttcatcacccgcataacataggggaccaaagggccctctatcatacagaaaatgcttatgtctctgtagtgtcttcacattatagcagaagattcaccccagaaatagccaaaagacccaaggtgagagatcaggaaggaagaatcaactactactggactctgcttgaacccggggatacaataatatttgaggcaaatggaaatctaatagcgccaaggtttgctttcgcactgagtagaggctttggatcaggaatcatcacctcaaatgcaccaatggatgaatgtgatgcgaaatgtcaaacacctcagggagctataaacagcagtcttcctttccagaatgtacacccagtcacaataggagagtgtccaaagtatgtcaggagtacaaaattaagaatggttacaggactaaggaacatcccatccattcaatccagaggtttgtttggagccattgccggtttcattgaaggggggtggactggaatggtagatggatggtatggttaccaccatcagaatgagcaaggatctgggtatgctgctgatcaaaaaagcacacaaaatgccattaacgggattacaaacaaggtgaattctgtaattgagaaaatgaacactcaattcacagctgtgggcaaagaattcaacaaattggaaagaaggatggaaaacttaaataaaaaagttgatgatgggtttctagacatttggacatataacgcagaattgttggttctactggaaaatgaaaggactttggacttccatgactccaacgtgaagaatctgtatgagaaagtaaaaagccaattaaagaataatgccaaagaaataggaaacgggtgttttgaattctatcacaagtgtaacgatgaatgcatggagagtgtgaaaaatggaacttatgactatccaaaatattccgaagaatcaaagttgaacagggagaaaattgatggagtgaaattggaatcaatgggagtctatcagattttggcgatctactcaacagtcgccagttccctggttcttttggtctccctgggggcaatcagcttctggatgtgttccaatgggtctttacagtgtagaatatgcatctaa

SEQ ID NO: 32527 - RNA, 1698 nt, synthetic construct; identical to SEQ ID NO: 32459
  misc_feature 1..1698: note = hemagglutinin__InfluenzaA__ABW39894
  source 1..1698: mol_type = other RNA

SEQ ID NO: 32528 - RNA, 1698 nt, synthetic construct
  misc_feature 1..1698: note = hemagglutinin__InfluenzaA__ABW39905
  source 1..1698: mol_type = other RNA
atgaaagtaaaactactgattctgttatgtacatttacagctacatatgcagacacaatatgtataggctaccatgccaacaactcgaccgacactgttgacacagtacttgagaagaatgtgacagtgacacactctgtcaacctacttgaggacagtcacaatggaaaactatgtctactaaaaggaatagccccactacaattgggtaattgcagcgttgccggatggatcttaggaaacccagaatgcgaattgctgatttccaaggaatcatggtcctacattgtagagacaccaaatcctgagaatggaacatgttacccagggtatttcgccgactatgaggagctgagagagcaattgagttcagtatcttcatttgagaggttcgaaatattccccaaagagagctcatggcccaaccacaccgtaaccggagtatcagcatcatgctcccataacgggaaaagcagtttttacagaaatttgctatggctgactgggaagaatggtttgtatccaaacctgagcaagtcctatgcaaacaacaaagagaaagaagtccttgtactgtggggtgttcatcacccgcctaacataggggaccaaagggccctctatcatacagaaaatgcttatgtctctgtagtgtcttcacattatagcagaagattcaccccagaaatagccaaaagacccaaggtgagagatcaggaaggaagaatcaactactactggactctgcttgaacccggggatacaataatatttgaggcaaatggaaatctaatagcgccaaggtttgctttcgcactgagtagaggctttggatcaggaatcatcacctcaaatgcaccaatggatgaatgtgatgcgaaatgtcaaacacctcagggagctataaacagcagtcttcctttccagaatgtacacccagtcacaataggagagtgtccaaagtatgtcaggagtacaaaattaagaatggttacaggactaaggaacatcccatccattcaatccagaggtttatttggagccattgccggtttcattgaagggggatggactggaatggtagatggttggtatggttatcaccatcagaatgagcaaggatctgggtatgctgcagatcaaaaaagcacacaaaatgccattaacgggattacaaacaaggtgaattctgtaattgagaaaatgaacactcaattcacagctgtgggcaaagaattcaacaaattggaaagaaggatggaaaacttaaataaaaaagttgatgatgggtttctagacatttggacatataacgcagaattgttggttctactggaaaatgaaaggactttggacttccatgactccaacgtgaagaatctgtatgagaaagtaaaaagccaattaaagaataatgccaaagaaataggaaacgggtgttttgaattctatcacaagtgtaacgatgaatgcatggagagtgtgaaaaatggaacttatgactatccaaaatattccgaagaatcaaagttgaacagggagaaaattgatggagtgaaattggaatcaatgggagtctatcagattttggcgatctactcaacagtcgccagttccctggttcttttggtctccctgggggcaatcagcttctggatgtgttccaatgggtctttgcagtgtagaatatgcatctaa

SEQ ID NO: 32529 - RNA, 1698 nt, synthetic construct; identical to SEQ ID NO: 32437
  misc_feature 1..1698: note = hemagglutinin__InfluenzaA__ABW39927
  source 1..1698: mol_type = other RNA

SEQ ID NO: 32530 - RNA, 1701 nt, synthetic construct
  misc_feature 1..1701: note = hemagglutinin__InfluenzaA__ABW39938
  source 1..1701: mol_type = other RNA
atgaagactatcattgctttgagctacattctatgtctggttttcgctcaaaaaattcctggaaatgacaacagcacggcaacgctgtgccttgggcaccatgcagtaccaaacggaacgatagtgaaaacaatcacgaatgaccaaattgaagttactaatgctactgagctggttcagagttcctcaacaggtgaaatatgcgacagtcctcatcagatccttgatggagaaaactgcacactaatagatgctctattgggagaccctcagtgtgatggcttccaaaataagaaatgggacctttttgttgaacgcagcaaagcctacagcaactgttacccttatgatgtgccggattatgcctcccttaggtcactagttgcctcatccggcacactggagtttaacaatgaaagcttcaattggactggagtcactcaaaacggaacaagctctgcttgcataaggagatctaataacagtttctttagtagattgaattggttgacccacttaaaattcaaatacccagcattgaacgtgactatgccaaacaatgaaaaatttgacaaattgtacatttggggggttcaccacccgggtacagacaatgaccaaatcttcctgtatgctcaagcatcaggaagaatcacagtctctaccaaaagaagccaacaaactgtaatcccgaatatcggatctagacccagagtaaggaatatccccagcagaataagcatctattggacaatagtaaaaccgggagacatacttttgattaacagcacagggaatctaattgctcctaggggttacttcaaaatacgaagtgggaaaagctcaataatgagatcagatgcacccattggcaaatgcaattctgaatgcatcactccaaatggaagcattcccaatgacaaaccattccaaaatgtaaacaggatcacatacggggcctgtcccagatatgttaagcaaaacactctgaaattggcaacagggatgcgaaatgtaccagagaaacaaactagaggcatatttggcgcaatcgcgggtttcatagaaaatggttgggagggaatggtggatggttggtacggtttcaggcatcaaaattctgagggaataggacaagcagcagatctcaaaagcactcaagcagcaatcgatcaaatcaatgggaagctgaataggttgatcgggaaaaccaacgagaaattccatcagattgaaaaagaattctcagaagtcgaagggaggattcaggaccttgagaaatatgttgaggacaccaaaatagatctctggtcatacaacgcggagcttcttgttgccctggagaaccaacatacaattgatctaactgactcagaaatgaacaaactgtttgaaaaaacaaagaagcaactgagggaaaatgctgaggatatgggcaatggttgtttcaaaatataccacaaatgtgacaatgcctgcataggatcaatcagaaatggaacttatgaccacgatgcatacagagatgaagcattaaacaaccggttccagatcaagggcgttgagctgaagtcaggatacaaagattggatcctatggatttcctttgccatatcatgttttttgctttgtgttgctttgttggggttcatcatgtgggcctgccaaaaaggcaacattaggtgcaacatttgcatttga

SEQ ID NO: 32531 - RNA, 1698 nt, synthetic construct; identical to SEQ ID NO: 32494
  misc_feature 1..1698: note = hemagglutinin__InfluenzaA__ABW39949
  source 1..1698: mol_type = other RNA

SEQ ID NO: 32532 - RNA, 1698 nt, synthetic construct; identical to SEQ ID NO: 32459
  misc_feature 1..1698: note = hemagglutinin__InfluenzaA__ABW39960
  source 1..1698: mol_type = other RNA

SEQ ID NO: 32533 - RNA, 1698 nt, synthetic construct; identical to SEQ ID NO: 32426
  misc_feature 1..1698: note = hemagglutinin__InfluenzaA__ABW39982
  source 1..1698: mol_type = other RNA

SEQ ID NO: 32534 - RNA, 1698 nt, synthetic construct
  misc_feature 1..1698: note = hemagglutinin__InfluenzaA__ABW39993
  source 1..1698: mol_type = other RNA
atgaaagtaaaactacttgttctgttatgtacatttacagctacatatgcagacacaatatgtataggctaccatgccaacaactcgaccgacactgttgacacagtacttgagaagaatgtgacagtgacacactctgtcaacctacttgaggacagtcacaatggaaaactatgtctactaaaaggaatagccccactacaattgggtaattgcagcgttgccggatggatcttaggaaacccagaatgcgaattactgatttccaaggaatcatggtcctacattgtagaaacaccaaatcctgagaatggaacatgttacccaggatatttcgctgactatgaggagctgagggagcaattgagttcagtatcttcatttgagaggttcgaaatattccccaaagagagctcatggcccaaccacaccgtaaccggagtatcagcatcatgctcccataacgggaaaagcagtttttacagaaatttgctatggctgacggggaagaatggtttgtatccaaacctgagcaagtcctatgcaaacaacaaagagaaagaagtccttgtactgtggggtgttcatcacccgcctaacataggggaccaaagggccctctatcatacagaaaatgcttatgtctctgtagtgtcttcacattatagcagaagattcaccccagaaatagccaaaagacctaaggtgagagatcaggaaggaagaatcaactactactggactctgctggaacccggggatacaataatatttgaggcaaatggaaatctaatagcgccaaggtttgctttcgcactgagtagaggctttggatcaggaatcatcacctcaaatgcaccaatgggtgaatgtgatgcgaagtgtcaaacacctcagggagctataaacagtagtcttcctttccagaatgtacacccagtcacaataggagagtgtccaaagtatgtcaggagtgcaaaattaagaatggttacaggactaaggaacattccatccattcaatccagaggtttgtttggagccattgccggtttcattgaaggggggtggactggaatggtagatggttggtatggttatcaccatcagaatgagcaaggatctgggtatgctgcagatcaaaaaagcacacaaaatgccattaacgggattacaaacaaggtgaattctgtaattgagaaaatgaacactcaattcacagctgtgggcaaagaattcaacaaattggaaagaaggatggaaaacttaaataaaaaggttgatgatgggtttctagacatttggacatataacgcagaattgttggttctactggaaaatgaaaggactttggacttccatgactccaacgtgaagaatctgtatgagaaagtaaaaagccaattaaagaataatgccaaagaaataggaaacgggtgttttgaattttatcacaagtgtaacgatgaatgcatggagagtgtgaaaaatggaacttatgactatccaaaatattccgaagaatcaaagttgaacagggagaaaattgatggagtgaaattggaatcaatgggagtctatcagattctggcgatctactcaacagtcgccagttccctggttcttttggtctccctgggggcaatcagcttctggatgtgttccaatgggtctttgcagtgtagaatatgcatctaa

SEQ ID NO: 32535 - RNA, 1698 nt, synthetic construct; identical to SEQ ID NO: 32430
  misc_feature 1..1698: note = hemagglutinin__InfluenzaA__ABW40004
  source 1..1698: mol_type = other RNA

SEQ ID NO: 32536 - RNA, 1698 nt, synthetic construct
  misc_feature 1..1698: note = hemagglutinin__InfluenzaA__ABW40015
  source 1..1698: mol_type = other RNA
atgaaagtgaaactactggttctgttatgtacatttacagctacatatgcagacacaatatgtataggctaccatgccaacaactcgaccgacactgttgacacagtacttgagaagaatgtgacagtgacacactctgtcaacctacttgaggaccgtcacaatggaaaactatgtctactaaaaggaatagccccactacaattgggtaattgcagcgttgccggatggatcttaggaaacccagaatgcgaattactgatttccaaggaatcatggtcttacattgtagaaacaccaaatcctgagaatggaacatgttacccagggtatttcgccgactatgaggagctgagggagcaattgagttcagtatcttcatttgagaggttcgaaatattccccaaagagagctcatggcccaaccacaccgtaaccggagtatcagcatcatgctcccataacgggaaaagcagtttttacagaaatttgctatggctgacgggaaagaatggtttgtacccaaacctgagcagatcctatgcaaacaacaaagagaaagaagtccttgtactgtggggtgttcatcacccgcctaacataggggaccaaagggccctctatcatacagaaaatgcttatgtctctgtagtgtcttcacattatagcagaagattcaccccagaaatagccaaaagacccaaggtgagagatcaggaaggaagaatcaattactactggactctactggaacccggggatacaataatatttgaggcaaatgggaatctaatagcgccaaggtttgctttcgcactgagtagaggctttggatcaggaatcatcacctcaaatgcaccaatggatgaatgtgatgcgaagtgtcaaacacctcagggagctataaacagcagtcttcctttccagaatgtacacccagtcacaataggagagtgtccaaagtatgtcaggagtgcaaaattaagaatggttacaggactaaggaacatcccatccattcaatccagaggtttgtttggagccattgccggtttcattgaaggggggtggactggaatggtagatggttggtatggttatcaccaccagaatgagcaaggatctgggtatgctgcagatcaaaaaagcacacaaaatgccattaacgggattacaaacaaggtgaattctgtgattgagaaaatgaacactcaattcacagctgtgggcaaagaattcaacaaattggaaagaagaatggaaaacttaaataaaaaagttgatgatgggtttctagacatttggacgtataacgcagagttgttggttctactggaaaatgaaaggactttggacttccatgactccaacgtgaagaatctgtatgagaaagtaaaaagccaattaaagaataatgccaaagaaataggaaacgggtgttttgaattctatcacaagtgtaacgatgaatgcatggagagtgtgaaaaatggaacttatgactatccaaaatattccgaagaatcaaagttaaacagggagaaaattgatggagtgaaattggaatcaatgggagtctatcagattctggcgatctactcaacagtcgccagttccctggttcttttggtctccctgggggcaatcagcttctggatgtgttccaatgggtctttgcagtgtagaatatgcatctaa

SEQ ID NO: 32537 - RNA, 1701 nt, synthetic construct; identical to SEQ ID NO: 32491
  misc_feature 1..1701: note = hemagglutinin__InfluenzaA__ABW40026
  source 1..1701: mol_type = other RNA

SEQ ID NO: 32538 - RNA, 1698 nt, synthetic construct; identical to SEQ ID NO: 32422
  misc_feature 1..1698: note = hemagglutinin__InfluenzaA__ABW40037
  source 1..1698: mol_type = other RNA

SEQ ID NO: 32539 - RNA, 1698 nt, synthetic construct
  misc_feature 1..1698: note = hemagglutinin__InfluenzaA__ABW40048
  source 1..1698: mol_type = other RNA
atgaaagtaaaactactggttctgttatgtacatttacagctacatatgcagacacaatatgtataggctaccatgccaacaactcgaccgacactgtcgacacagtacttgagaagaatgtgacagtaacacactctgtcaacctacttgaggacagtcacaatggaaaactatgtctactaaaaggaatagccccactacaattgggtaattgcagcgttgccggatggatcttaggaaacccagaatgcgaattactgatttccaaggaatcatggtcctacattgtagagacaccaaatcctgagaatggaacatgttacccagggtatttcgccgactatgaggagctgagagagcaattgagttcagtatcttcatttgagaggttcgaaatattccccaaagagagctcatggcccaaccacaccgtaaccggagtatcagcatcatgctcccataacgggaaaagcagtttttacagaaatttgctatggctgacggggaagaatggtttgtatccaaacctgagcaagtcctatgcaaacaacaaagagaaagaagtccttgtactgtggggtgttcatcacccgcctaacataggggaccaaaaggccctctatcatacagaaaatgcttatgtttctgtagtgtcttcacattatagcagaagattcaccccagaaatagccaaaagacccaaggtgagagatcaggaaggaagaatcaactactactggactctgcttgaacccggggatacaataatatttgaggcaaatggaaatctaatagcaccaaggtttgctttcgcactgagtagaggctttggatcaggaatcatcacctcaaatgcaccaatggatgaatgtgatgcgaaatgtcaaacacctcagggagctataaacagcagtcttcctttccagaatgtacacccagtcacaataggagagtgtccaaagtatgtcaggagtacaaaattaagaatggttacaggactaaggaacatcccatccattcaatccagaggtttgtttggagccattgccggtttcattgaaggggggtggactggaatggtagatggttggtatggttatcaccatcagaatgagaaaggatctgggtatgctgcagatcaaaaaagcacacaaaatgccattaacggaattacaaacaaggtgaattccgtaattgagaaaatgaacactcaattcacagctgtgggcaaagaattcaacaaattggaaagaaggatggaaaacttaaataaaaaagttgatgatgggtttctagacatttggacatataacgcagaattgttggttctactggaaaatgaaaggactttggacttccatgactccaacgtgaagaatctgtatgagaaagtaaaaagccaattaaagaataatgccaaagaaataggaaacgggtgttttgaattctatcacaagtgtaacgatgaatgcatggagagtgtgaaaaatggaacttatgactatccaaaatattccgaagaatcaaagttgaacagggagaaaattgatggagtgaaattggaatcaatgggagtctatcagattttggcgatctactcaacagtcgccagttccctggttcttttggtctccctgggggcaatcagcttctggatgtgttccaatgggtctttgcagtgtagaatatgcatctaa

SEQ ID NO: 32540 - RNA, 1698 nt, synthetic construct; identical to SEQ ID NO: 32429
  misc_feature 1..1698: note = hemagglutinin__InfluenzaA__ABW40059
  source 1..1698: mol_type = other RNA

SEQ ID NO: 32541 - RNA, 1698 nt, synthetic construct
  misc_feature 1..1698: note = hemagglutinin__InfluenzaA__ABW40070
  source 1..1698: mol_type = other RNA
atgaaagtaaaactactggtcctgttatgcacatttacagctacatatgcagacacaatatgtataggctaccatgctaacaactcgaccgacactgttgacacagtacttgaaaagaatgtgacagtgacacactctgtcaacctgcttgagaacagtcacaatggaaaactatgtctattaaaaggaatagccccactacaattgggtaattgcagcgttgccgggtggatcttaggaaacccagaatgcgaattactgatttccaaggagtcatggtcctacattgtagaaaaaccaaatcctgagaatggaacatgttacccagggcatttcgctgactatgaggaactgagggagcaattgagttcagtatcttcatttaagaggttcgaaatattccccaaagaaagctcatggcccaaccacaccgtaaccggagtgtcagcatcatgctcccataatggggaaagcagtttttacagaaatttgctatggctgacggggaagaatggtttgtacccaaacctgagcaagtcctatgcaaacaacaaagaaaaagaagtccttgtactatggggtgttcatcacccgccaaacataggtgaccaaaaggccctctatcatacagaaaatgcttatgtctctgtagtgtcttcacattatagcagaaaattcaccccagaaatagccaaaagacccaaagtaagagatcaagaaggaagaatcaactactactggactctgcttgaacccggggatacaataatatttgaggcaaatggaaacctaatagcgccaagatatgctttcgcactgagtagaggctttggatcaggaatcatcaactcaaatgcaccaatggataaatgtgattcgaagtgccaaacacctcagggagctataaacagcagtcttcctttccagaatgtacacccagtcacaataggagagtgtccaaagtatgtcaggagtgcaaaattaaggatggttacaggactaaggaacatcccatccattcaatccagaggtttgtttggagccattgccggtttcattgaaggggggtggactggaatggtagatggttggtatggttatcatcatcagaatgagcaaggatctggctatgctgcagatcaaaaaagcacacaaaatgccattaatgggattacaaacaaggtgaattctgtaattgagaaaatgaacactcaattcacagcagtgggcaaagaattcaacaaattggaaagaaggatggaaaacttgaataaaaaagttgatgatgggtttatagacatttggacatataatgcagaactgttggttctactggaaaatgaaaggactttggatttccatgattccaatgtgaagaatctgtatgagaaagtaaaaagccagttaaagaataatgccaaagaaataggaaatgggtgttttgaattctatcacaagtgtaacgatgaatgcatggagagtgtaaagaatggaacttatgactatccaaaatattccgaagaatcaaagttaaacagggagaaaattgatggagtgaaattggaatcaatgggagtctatcagattctggcgatctactcaacagtcgccagttctctggttcttttggtctccctgggggcaatcagcttctggatgtgttccaatgggtctttgcagtgtagaatatgcatctaa

SEQ ID NO: 32542 - RNA, 1701 nt, synthetic construct
  misc_feature 1..1701: note = hemagglutinin__InfluenzaA__ABW40081
  source 1..1701: mol_type = other RNA
atgaagactatcattgctttgagctacattctatgtctggttttcgctcaaaaacttcctggaaatgacaacagcacggcaacgctgtgccttgggcaccatgcagtaccaaacggaacgatagtgaaaacaatcacgaatgaccaaattgaagttactaatgctactgagctggttcagagttcctcaacaggtgaaatatgcgacagtcctcatcagatccttgatggagaaaactgcacactaatagatgctctattgggggaccctcagtgtgatggcttccaaaataagaaatgggacctttttgttgaacgcagcaaagcctacagcaactgttacccttatgatgtgccggattatgcctcccttaggtcactagttgcctcatccggcacactggagtttaacaatgaaagcttcaattggactggagtcactcaaaacggaacaagctctgcttgcataaggagatctaataacagtttctttagtagattgaattggttgacccacttaaaattcaaatacccagcattgaacgtgactatgccaaacaatgaaaaatttgacaaattgtacatttggggggttcaccacccgggtacggacaatgaccaaatcttcctgtatgctcaagcatcaggaagaatcacagtctctaccaaaagaagccaacaaactgtaatcccgaatatcggatctagacccagagtaaggaatatccccagcagaataagcatctattggacaatagtaaaaccgggagacatacttttgattaacagcacagggaatctaattgctcctaggggttacttcaaaatacgaagtgggaaaagctcaataatgagatcagatgcacccattggcaaatgcaattctgaatgcatcactccaaatggaagcattcccaatgacaaaccattccaaaatgtaaacaggatcacatacggggcctgtcccagatatgttaagcaaaacactctgaaattggcaacagggatgcgaaatgtaccagagaaacaaactagaggcatatttggcgcaatcgcgggtttcatagaaaatggttgggagggaatggtggatggttggtacggtttcaggcatcaaaattctgagggaataggacaagcagcagatctcaaaagcactcaagcagcaatcgatcaaatcaatgggaagctgaataggttgatcgggaaaaccaacgagaaattccatcagattgaaaaagaattctcagaagtcgaagggaggattcaggaccttgagaaatatgttgaggacaccaaaatagatctctggtcatacaacgcggagcttcttgttgccctggagaaccaacatacaattgatctaactgactcagaaatgaacaaactgtttgaaaaaacaaagaagcaactgagggaaaatgctgaggatatgggcaatggttgtttcaaaatataccacaaatgtgacaatgcctgcataggatcaatcagaaatggaacttatgaccacgatgtatacagagatgaagcattaaacaaccggttccagatcaagggcgttgagctgaagtcaggatacaaagattggatcctatggatttcctttgccatatcatgttttttgctttgtgttgctttgttggggttcatcatgtgggcctgccaaaaaggcaacattaggtgcaacatttgcatttga

SEQ ID NO: 32543 - RNA, 1698 nt, synthetic construct
  misc_feature 1..1698: note = hemagglutinin__InfluenzaA__ABW40092
  source 1..1698: mol_type = other RNA
atgaaagtaaaactactgattctgttatgtacatttacagctacatatgcagacacaatatgtataggctaccatgccaacaactcgaccgacactgttgacacagtacttgagaagaatgtgacagtgacacactctgtcaacctacttgaggacagtcacaatggaaaactatgtctactaaaaggaatagccccactacaattgggtaattgcagcgttgccggatggatcttaggaaacccagaatgcgaattactgatttccaaggaatcatggtcctacattgtagagacaccaaatcctgagaatggaacatgttacccagggtatttcgccgactatgaggagctgagagagcaattgagttcagtatcttcatttaagaggttcgaaatattccccaaagagagctcatggcccaaccacaccgtaaccggagtatcagcatcatgctcccataacgggaaaagcagtttttacagaaatttgctatggctgacggggaagaatggtttgtatccaaacctgagcaagtcctatgcaaacaacaaagagaaagaagtccttgtactgtggggtgttcatcacccgcctaacataggggaccaaagggccctctatcatacagaaaatgcttatgtctctgtagtgtcttcacattatagcagaagattcaccccagaaatagccaaaagacccaaggtgagagatcaggaaggaagaatcaactactactggactctgcttgaacccggggatacaataatatttgaggcaaatggaaatctaatagcgccaaggtttgctttcgcactgagtagaggctttggatcaggaatcatcacctcaaatgcaccaatggatgaatgtgatgcgaaatgtcaaacacctcagggagctataaacagcagtcttcctttccagaatgtacacccagtcacaataggagagtgtccaaagtatgtcaggagtacaaaattaagaatggttacaggactaaggaacatcccatccattcaatccagaggtttatttggagccattgccggtttcattgaaggggggtggactggaatggtagatggttggtatggttatcaccatcagaatgagcaaggatctgggtatgctgcagatcaaaaaagcacacaaaatgccattaacgggattacaaacaaggtgaattctgtaattgagaaaatgaacactcaattcacagctgtgggcaaagaattcaacaaattggaaagaaggatggaaaacttaaataaaaaagttgatgatgggttcctagacatttggacatataacgcagaattgttggttctactggaaaatgaaaggactttggacttccatgactccaacgtgaagaatctgtatgagaaagtaaaaagccaattaaagaataatgccaaagaaataggaaacgggtgttttgaattctatcacaagtgtaacgatgaatgcatggagagtgtgaaaaatggaacttatgactatccaaaatattccgaagaatcaaagttgaacagggagaaaattgatggagtgaaattggaatcaatgggagtctatcagattttggcgatctactcaacagtcgccagttccctggttcttttggtctccctgggggcaatcagcttctggatgtgttccaatgggtctttgcagtgtagaatatgcatctaa

SEQ ID NO: 32544 - RNA, 1698 nt, synthetic construct; identical to SEQ ID NO: 32461
  misc_feature 1..1698: note = hemagglutinin__InfluenzaA__ABW40103
  source 1..1698: mol_type = other RNA

SEQ ID NO: 32545 - RNA, 1698 nt, synthetic construct
  misc_feature 1..1698: note = hemagglutinin__InfluenzaA__ABW40114
  source 1..1698: mol_type = other RNA
atgaaagtaaaactactgattctgttatgtacatttacagctacatatgcagacacaatatgtataggctaccatgccaacaactcgaccgacactgttgacacagtacttgagaagaatgtgacagtgacacactctgtcaacctacttgaggacagtcacaatggaaaactatgtctactaaaaggaatagccccactacaattgggtaattgcagcgttgccggatggatcttaggaaacccagaatgcgaattactgatttccaaggaatcatggtcctacattgtagagacaccaaatcctgagaatggaacatgttacccagggtatttcgccgactatgaggagctgagagagcaattgagttcagtgtcttcatttgagaggttcgaaatattccccaaagagagctcatggcccaaccacaccgtaaccggagtatcaacatcatgctcccataacgggaaaagcagtttttacagaaatttgctatggctgacggggaagaatggtttgtatccaaacctgagcaagtcctatgcaaacaacaaagagaaagaagtccttgtactgtggggtgttcatcacccgcctaacatagggaaccaaagggccctctatcatacagaaaatgcttatgtctctgtagtgtcttcacattatagcagaagattcaccccagaaatagccaaaagacccaaggtgagagatcaggaaggaagaatcaactactactggactctgcttgaacccggggatacaataatatttgaggcaaatggaaatctaatagcgccaaggtttgctttcgcactgagtagaggctttggatcaggaatcatcacctcaaatgcaccaatggatgaatgtgatgcgaaatgtcaaacacctcagggagctataaacagcagtcttcctttccagaatgtacacccagtcacaataggagagtgtccaaagtatgtcaggagtacaaaattaagaatggttacaggactaaggaacatcccatccattcaatccagaggtttatttggagccattgccggtttcattgaaggggggtggactggaatggtagatggttggtatggttatcaccatcagaatgagcaaggatctgggtatgctgcagatcaaaaaagcacacaaaatgccattaacgggattacaaacaaggtgaattctgtaattgagaaaatgaacactcaattcacagctgtgggcaaagaattcaacaaattggaaagaaggatggaaaacttaaataaaaaagttgatgatgggtttctagacatttggacatataacgcagaattgttggttctactggaaaatgaaaggactttggacttccatgactccaacgtgaagaatctgtatgagaaagtaaaaagccaattaaagaataatgccaaagaaataggaaacgggtgttttgaattctatcacaagtgtaacgatgaatgcatggagagtgtgaaaaatggaacttatgactatccaaaatattccgaagaatcaaagttgaacagggagaaaattgatggagtgaaattggaatcaatgggagtctatcagattttggcgatctactcaacagtcgccagttccctggttcttttggtctccctgggggcaatcagcttctggatgtgttccaatgggtctttgcagtgtagaatatgcatctaa

SEQ ID NO: 32546 - RNA, 1698 nt, synthetic construct
  misc_feature 1..1698: note = hemagglutinin__InfluenzaA__ABW40125
  source 1..1698: mol_type = other RNA
atgaaagtaaaactactgattctgttatgtacatttacagctacatatgcagacacaatatgtataggctaccatgccaacaactcgaccgacactgttgacacagtacttgagaagaatgtgacagtgacacactctgtcaacctacttgaggacagtcacaatggaaaactatgtctactaaaaggaatagccccactacaattgggtaattgcagcgttgccggatggatcttaggaaacccagaatgcgaattgctgatttccaaggaatcatggtcctacattgtagagacaccaaatcctgagaatggaacatgttacccagggtatttcgccgactatgaggagctgagagagcaattgagttcagtatcttcatttgagaggttcgaaatattccccaaagagagctcatggcccaaccacaccgtaaccggagtatcagcatcatgctcccataacgggaaaagcagtttttacagaaatttgctatggctgacggggaagaatggtttgtatccaaacctgagcaagtcctatgcaaacaacaaagagaaagaagtccttgtactgtggggtgttcatcacccgcctaacataggggaccaaagggccctctatcatacagaaaatgcttatgtctctgtagtgtcttcacattatagcagaagattcaccccagaaatagccaaaagacccaaggtgagagatcaggaaggaagaatcaactactactggactctgcttgaacccggggatacaataatatttgaggcaaatggaaatctaatagcaccaaggtttgctttcgcactgagtagaggctttggatcaggaatcatcacctcaaatgcaccaatggatgaatgtgatgcgaaatgtcaaacacctcagggagctataaacagcagtcttcctttccagaatgtacacccagtcacaataggagagtgtccaaagtatgtcaggagtacaaaattaagaatggttacaggactaaggaacatcccatccattcaatccagaggtttatttggagccattgccggtttcattgaaggggggtggactggaatggtagatggttggtatggttatcaccatcagaatgagcaaggatctgggtatgctgcagatcaaaaaagcacacaaaatgccattaacgggattacaaacaaggtgaattctgtaattgagaaaatgaacactcaattcacagctgtgggcaaagaattcaacaaattggaaagaaggatggaaaacttaaataaaaaagttgatgatgggtttctagacatttggacatataacgcagaattgttggttctactggaaaatgaaaggactttggacttccatgactccaacgtgaagaatctgtatgagaaagtaaaaagccaattaaagaataatgccaaagaaataggaaacgggtgttttgaattctatcacaagtgtaacgatgaatgcatggagagtgtgaaaaatggaacttatgactatccaaaatattccgaagaatcaaagttgaacagggagaaaattgatggagtgaaattggaatcaatgggagtctatcagattttggcgatctactcaacagtcgccagttccctggttcttttggtctccctgggggcaatcagcttctggatgtgttccaatgggtctttgcagtgtagaatatgcatctaa

SEQ ID NO: 32547 - RNA, 1701 nt, synthetic construct
  misc_feature 1..1701: note = hemagglutinin__InfluenzaA__ABW40136
  source 1..1701: mol_type = other RNA
atgaagactatcattgctttgagctacattctatgtctggttttcgctcaaaaacttcctggaaatgacaacagcacggcaacgctgtgccttgggcaccatgcagtaccaaacggaacgatagtgaaaacaatcacgaatgaccaaattgaagttactaatgctactgagctggttcagagttcttcaacaggtgaaatatgcgacagtcctcatcagatccttgatggagaaaactgcacactaatagatgctctattgggagaccctcagtgtgatggcttccaaaataagaaatgggacctttttgttgaacgcagcaaagcctacagcaactgttacccttatgatgtgccggattatgcctcccttaggtcactagttgcctcatccggcacactggagtttaacaatgaaagcttcaattggactggagtcactcaaaacggaacaagctctgcttgcataaggagatctaataacagtttctttagtagattgaattggttgacccacttgaaattcaaatacccagcattgaacgtgactatgccaaacaatgaaaaatttgacaaattgtacatttggggggttcaccacccgggtacggacaatgaccaaatcttcctgtatgctcaagcatcaggaagaatcacagtctctaccaaaagaagccaacaaactgtaatcccgaatatcggatctagacccagagtaaggaatatccccagcagaataagcatctattggacaatagtaaaaccgggagacatacttttgattaacagcacagggaatctaattgctcctaggggttacttcaaaatacgaagtgggaaaagctcaataatgagatcagatgcacccattggcaaatgcaattctgaatgcatcactccaaatggaagcattcccaatgacaaaccattccaaaatgtaaacaggatcacatacggggcctgtcccagatatgttaagcaaaacactctgaaattggcaacagggatgcgaaatgtaccagagaaacaaactagaggcatatttggcgcaatcgcgggtttcatagaaaatggttgggagggaatggtggatggttggtacggtttcaggcatcaaaattctgagggaataggacaagcagcagatctcaaaagcactcaagcagcaatcgatcaaatcaatgggaagctgaataggttgatcgggaaaaccaacgagaaattccatcagattgaaaaagaattctcagaagtcgaagggagaattcaggaccttgagaaatatgttgaggacaccaaaatagatctctggtcatacaacgcggagcttcttgttgccctggagaaccaacatacaattgatctaactgactcagaaatgaacaaactgtttgaaaaaacaaagaagcaactgagggaaaatgctgaggatatgggcaatggttgtttcaaaatataccacaaatgtgacaatgcctgcataggatcaatcagaaatggaacttatgaccacgatgtatacagagatgaagcattaaacaaccggttccagatcaagggcgttgagctgaagtcaggatacaaagattggatcctatggatttcctttgccatatcatgttttttgctttgtgttgctttgttggggttcatcatgtgggcctgccaaaaaggcaacattaggtgcaacatttgcatttga

SEQ ID NO: 32548 - RNA, 1698 nt, synthetic construct; identical to SEQ ID NO: 32449
  misc_feature 1..1698: note = hemagglutinin__InfluenzaA__ABW40147
  source 1..1698: mol_type = other RNA

SEQ ID NO: 32549 - RNA, 1698 nt, synthetic construct
  misc_feature 1..1698: note = hemagglutinin__InfluenzaA__ABW40158
  source 1..1698: mol_type = other RNA
atgaaagtaaaactattggttctgttatgtacatttacagctacatatgcagacacaatatgtataggctaccatgccaacaactcgaccgacactgttgacacagtacttgagaagaatgtgacagtgacacactctgtcaacctacttgaggacagtcacaatggaaaactatgtctactaaaaggaatagccccactacaattgggtaattgcagcgttgccggatggatcttaggaaacccagaatgcgaattactgatttccaaggaatcatggtcctacattgtagagacaccaaatcctgagaatggaacatgttacccagggtatttcgccgactatgaggagctgagagagcaattgagttcagtatcttcatttgagaggttcgaaatattccccaaagagagctcatggcccaaccacaccgtaaccggagtatcagcatcatgctcccataacgggaaaagcagtttttacagaaatttgctatggctgacggggaagaatggtttgtatccaaacctgagcaagtcctatgcaaacaacaaagagaaagaagtccttgtactgtggggtgttcatcacccgcctaacataggggaccaaagggccctctatcatacagaaaatgcttatgtctctgtagtgtcttcacattatagcagaagattcaccccagaaatagccaaaagacccaaggtgagagatcaggaaggaagaatcaactactactggactctgcttgaacccggggatacaataatatttgaggcaaatggaaatctaatagcgccaaggtttgctttcgcactgagtagaggctttggatcaggaatcatcacctcaaatgcaccaatggatgaatgtgatgcgaaatgtcaaacacctcagggagctataaacagcagtcttcctttccagaatgtacacccagtcacaataggagagtgtccaaagtatgtcaggagtacaaaattaagaatggttacaggactaaggaacatcccatccattcaatccagaggtttgtttggagccatcgccggtttcattgaaggggggtggactggaatggtagatggttggtatggttatcaccatcagaatgagcaaggatctgggtatgctgctgatcaaaaaagcacacaaaatgccattaacgggattacaaacaaggtgaattctgtaattgagaaaatgaacactcaattcacagctgtgggcaaagaattcaacaaattggaaagaaggatggaaaacttaaataaaaaagttgatgatgggtttctagacatttggacatataacgcagaattgttggttctactggaaaatgaaaggactttggacttccatgactccaacgtgaagaatctgtatgagaaagtaaaaagccaattaaagaataatgccaaagaaataggaaacgggtgttttgaattctatcacaagtgtaacgatgaatgcatggagagtgtgaaaaatggaacttatgactatccaaaatattccgaagaatcaaagttgaacagggagaaaattgatggagtgaaattggaatcaatgggagtctatcagattttggcgatctactcaacagtcgccagttccctggttcttttggtctccctgggggcaatcagcttctggatgtgttccaatgggtctttgcagtgtagaatatgcatctaa

SEQ ID NO: 32550 - RNA, 1698 nt, synthetic construct; identical to SEQ ID NO: 32418
  misc_feature 1..1698: note = hemagglutinin__InfluenzaA__ABW40180
  source 1..1698: mol_type = other RNA

SEQ ID NO: 32551 - RNA, 1701 nt, synthetic construct
  misc_feature 1..1701: note = hemagglutinin__InfluenzaA__ABW40191
  source 1..1701: mol_type = other RNA
atgaagactatcattgctttgagctacattctatgtctggttttcgctcaaaaacttcccggaaatgacaacagcacggcaacgctgtgccttgggcaccatgcagtaccaaacggaacgatagtgaaaacaatcacgaatgaccaaattgaagttactaatgctactgagctggttcagagttcctcaacaggtgaaatatgcgacagtcctcatcagatccttgatggagaaaactgcacactaatagatgctctattgggagaccctcagtgtgatggcttccaaaataagaaatgggacctttttgttgaacgcagcaaagcctacagcaactgttacccttatgatgtgccggattatgcctcccttaggtcactagttgcctcatccggcacactggagtttaacaatgaaagcttcaattggactggagtcactcaaaacggaacaagctctgcttgcataaggagatctaataacagtttctttagtagattgaattggttgacccacttaaaattcaaatacccagcattgaacgtgactatgccaaacaatgaaaaatttgacaaattgtacatttggggggttcaccacccgggtacggacaatgaccaaatcttcctgtatgctcaagcatcaggaagaatcacagtctctaccaaaagaagccaacaaactgtaatcccgaatatcggatctagacccagagtaaggaatatccccagcagaataagcatctattggacaatagtaaaaccgggagacatacttttgattaacagcacagggaatctaattgctcctaggggttacttcaaaatacgaagtgggaaaagctcaataatgagatcagatgcacccattggcaaatgcaattctgaatgcatcactccaaatggaagcattcccaatgacaaaccattccaaaatgtaaacaggatcacatacggggcctgtcccagatatgttaagcaaaacactctgaaattggcaacagggatgcgaaatgtaccagagaaacaaactagaggcatatttggcgcaatcgcgggtttcatagaaaatggttgggagggaatggtggatggttggtacggtttcaggcatcaaaattctgagggaataggacaagcagcagatctcaaaagcactcaagcagcaatcgatcaaatcaatgggaagctgaataggttgatcgggaaaaccaacgagaaattccatcagattgaaaaagaattctcagaagtcgaagggagaattcaggaccttgagaaatatgttgaggacaccaaaatagatctctggtcatacaacgcggagcttcttgttgccctggagaaccaacatacaattgatctaactgactcagaaatgaacaaactgtttgaaaaaacaaagaagcaactgagggaaaatgctgaggatatgggcaatggttgtttcaaaatataccacaaatgtgacaatgcctgcataggatcaatcagaaatggaacttatgaccacgatgtatacagagatgaagcattaaacaaccggttccagatcaagggcgttgagctgaagtcaggatacaaagattggatcctatggatttcctttgccatatcatgttttttgctttgtgttgctttgttggggttcatcatgtgggcctgccaaaaaggcaacattaggtgcaacatttgcatttga

SEQ ID NO: 32552 - RNA, 1698 nt, synthetic construct
  misc_feature 1..1698: note = hemagglutinin__InfluenzaA__ABW40202
  source 1..1698: mol_type = other RNA
atgaaagtaaaactacttgttctgttatgtacatttacagctacatatgcagacacaatatgtataggctaccatgccaacaactcgaccgacactgttgacacagtacttgagaagaatgtgacagtgacacactctgtcaacctacttgaggacagtcacaatggaaaactatgtctactaaaaggaatagccccactacaattgggtaattgcagcgttgccggatggatcttaggaaacccagaatgcgaattactgatttccaaggaatcatggtcctacattgtagaaacaccaaatcctgagaatggaacatgttacccaggatatttcgccgactatgaggagctgagggagcaattgagttcagtatcttcatttgagaggttcgaaatattccccaaagagagctcatggcccaaccacaccgtaaccggagtatcagcatcatgctcccataacgggaaaagcagtttttacagaaatttgctatggctgacggggaagaatggtttgtatccaaacctgagcaagtcctatgcaaacaacaaagagaaagaagtccttgtactgtggggtgttcatcacccgcctaacataggggaccaaagggccctctatcatacagaaaatgcttatgtctctgtagtgtcttcacattatagcagaagattcaccccagaaatagccaaaagacccaaggtgagagatcaggaaggaagaatcaactactactggactctgctggaacccggggatacaataatatttgaggcaaatggaaatctgatagcgccaaggtttgctttcgcactgagtagaggctttggatcaggaatcatcacctcaaatgcaccaatgggtgaatgtgatgcgaagtgtcaaacacctcagggagctataaacagtagtcttcctttccagaatgtacacccagtcacaataggagagtgtccaaagtatgtcaggagtgcaaaattaagaatggttacaggactaaggaacatcccatccattcaatccagaggtttgtttggagccattgccggtttcattgaaggggggtggactggaatggtagatggttggtatggttatcaccatcagaatgagcaaggatctgggtatgctgcagatcaaaaaagcacacaaaatgccattaacgggattacaaacaaggtgaattctgtaattgagaaaatgaacactcaattcacagctgtgggcaaagaattcaacaaattggaaagaaggatggaaaacttaaataaaaaggttgatgatgggtttctagacatttggacatataacgcagaattgttggttctactggaaaatgaaaggactttggacttccatgactccaacgtgaagaatctgtatgagaaagtaaaaagccaattaaagaataatgccaaagaaataggaaacgggtgttttgaattctatcacaagtgtaacgatgaatgcatggagagtgtgaaaaatggaacttatgactatccaaaatattccgaagaatcaaagttgaacagggagaaaattgatggagtgaaattggaatcaatgggagtctatcagattctggcgatctactcaacagtcgccagttccctggttcttttggtctccctgggggcaatcagcttctggatgtgttccaatgggtctttgcagtgtagaatatgcatctaa

SEQ ID NO: 32553 - RNA, 1698 nt, synthetic construct; identical to SEQ ID NO: 32430
  misc_feature 1..1698: note = hemagglutinin__InfluenzaA__ABW40213
  source 1..1698: mol_type = other RNA

SEQ ID NO: 32554 - RNA, 1698 nt, synthetic construct; identical to SEQ ID NO: 32430
  misc_feature 1..1698: note = hemagglutinin__InfluenzaA__ABW40224
  source 1..1698: mol_type = other RNA

SEQ ID NO: 32555 - RNA, 1698 nt, synthetic construct; identical to SEQ ID NO: 32418
  misc_feature 1..1698: note = hemagglutinin__InfluenzaA__ABW40235
  source 1..1698: mol_type = other RNA

SEQ ID NO: 32556 - RNA, 1701 nt, synthetic construct
  misc_feature 1..1701: note = hemagglutinin__InfluenzaA__ABW40246
  source 1..1701: mol_type = other RNA
atgaagactatcattgctttgagctacattctatgtctggttttcgctcaaaaacttcctggaaatgacaacagcacggcaacgctgtgccttgggcaccatgcagtaccaaacggaacgatagtgaaaacaatcacgaatgaccaaattgaagttactaatgctactgagctggttcagagttcctcaacaggtgaaatatgcgacagtcctcatcagatccttgatggagaaaactgcacactaatagatgctctattgggagaccctcagtgtgatggcttccaaaataagaaatgggacctttttgttgaacgcagcaaagcctacagcaactgttacccttatgatgtgccggattatgcctcccttaggtcactagttgcctcatccggcacactggagtttaacaatgaaagcttcaattggactggagtcactcaaaacggaacaagctctgcttgcataaggagatctaataacagtttctttagtagattgaattggttgacccacttaaaattcaaatacccagcattgaacgtgactatgccaaacaatgaaaaatttgacaaattgtacatttggggggttcaccacccgggtacggacaatgaccaagtcttcctgtatgctcaagcatcaggaagaatcacagtctctaccaaaagaagccaacaaactgtaatcccgaatatcggatctagacccagagtaaggaatatccccagcagaataagcatctattggacaatagtaaaaccgggagacatacttttgattaacagcacagggaatctaattgctcctaggggttacttcagaatacgaagtgggaaaagctcaataatgagatcagatgcacccattggcaaatgcaattctgaatgcatcactccaaatggaagcattcccaatgacaaaccattccaaaatgtaaacaggatcacatacggggcctgtcccagatatgttaagcaaaacactctgaaattggcaacagggatgcgaaatgtaccagagaaacaaactagaggcatatttggcgcaatcgcgggtttcatagaaaatggttgggagggaatggtggatggttggtacggtttcaggcatcaaaattctgagggaataggacaagcagcagatctcaaaagcactcaagcagcaatcgatcaaatcaatgggaagctgaataggttgatcgggaaaaccaacgagaaattccatcagattgaaaaagaattctcagaagtcgaagggagaattcaggaccttgagaaatatgttgaggacaccaaaatagatctctggtcatacaacgcggagcttcttgttgccctggagaaccaacatacaattgatctaactgactcagaaatgaacaaactgtttgaaaaaacaaagaagcaactgagggaaaatgctgaggatatgggcaatggttgtttcaaaatataccacaaatgtgacaatgcctgcataggatcaatcagaaatggaacttatgaccacgatgtatacagagatgaagcattaaacaaccggttccagatcaagggcgttgagctgaagtcaggatacaaagattggatcctatggatttcctttgccatatcatgttttttgctttgtgttgctttgttggggttcatcatgtgggcctgccaaaaaggcaacattaggtgcaacatttgcatttga

SEQ ID NO: 32557 - RNA, 1698 nt, synthetic construct
  misc_feature 1..1698: note = hemagglutinin__InfluenzaA__ABW40257
  source 1..1698: mol_type = other RNA
atgaaagtaaaactactgattctgttatgtacatttacagctacatatgcagacacaatatgtataggctaccatgccaacaactcgaccgacactgttgacacagtacttgagaagaatgtgacagtgacacactctgtcaacctacttgaggacagtcacaatggaaaactatgtctactaaaaggaatagccccactacaattgggtaattgcagcgttgccggatggatcttaggaaacccagaatgcgaattactgatttccaaggaatcatggtcctacattgtagagacaccaaatcctgagaatggaacatgttacccagggtatttcgccgactatgaggagctgagagagcaattgagttcagtatcttcatttgagaggttcgaaatattccccaaagagagctcatggcccaaccacaccgtaaccggagtatcagcatcatgctcccataacgggaaaagcagtttttacagaaatttgctatggctgacggggaagaatggtttgtatccaaacctgagcaagtcctatgcaaacaacaaagagaaagaagtccttgtactgtggggtgttcatcacccgcctaacataggggaccaaagggccctctatcatacagaaaatgcttatgtctctgtagtgtcttcacattatagcagaagattcaccccagaaatagccaaaagacccaaggtgagagatcaggaaggaagaatcaactactactggactctgcttgaacccggggatacaataatatttgaggcaaatggaaatctaatagcgccaaggtttgctttcgcactgagtagaggctttggatcaggaatcatcacctcaaatgcaccaatggatgaatgtgatgcgaaatgtcaaacacctcagggagctataaacagcagtcttcctttccagaatgtacacccagtcacaataggagagtgtccaaagtatgtcaggagtacaaaattaagaatggttacaggactaaggaacatcccatccattcaatccagaggtttatttggagccattgccggtttcattgaaggggggtggactggaatggtagatggttggtatggttatcaccatcagaatgagcaaggatctgggtatgctgcagatcaaaaaagcacacaaaatgccattaacgggattacaaacaaggtgaattctataattgagaaaatgaacactcaattcacagctgtgggcaaagaattcaacaaattggaaagaaggatggaaaacttaaataaaaaagttgatgatgggtttctagacatttggacatataacgcagaattgttggttctactggaaaatgaaaggactttggacttccatgactccaacgtgaagaatctgtatgagaaagtaaaaagccaattaaagaataatgccaaagaaataggaaacgggtgttttgaattctatcacaagtgtaacgatgaatgcatggagagtgtgaaaaatggaacttatgactatccaaaatattccgaagaatcaaagttgaacagggagaaaattgatggagtgaaattggaatcaatgggagtctatcagattttggcgatctactcaacagtcgccagttccctggttcttttggtctccctgggggcaatcagcttctggatgtgttccaatgggtctttgcagtgtagaatatgcatctaa

SEQ ID NO: 32558 - RNA, 1701 nt, synthetic construct
  misc_feature 1..1701: note = hemagglutinin__InfluenzaA__ABW40268
  source 1..1701: mol_type = other RNA
atgaagactatcattgctttgagctacattctatgtctggttttcgctcaaaaacttcctggaaatgacaacagcacggcaacgctgtgccttgggcaccatgcagtaccaaacggaacgatagtgaaaacaatcacgaatgaccaaattgaagttactaatgctactgagctggttcagagttcctcaacaggtgaaatatgcgacagtcctcatcagatccttgatggagaaaactgcacactaatagatgctctattgggagaccctcagtgtgatggcttccaaaataagaaatgggacctttttgttgaacgcagcaaagcctacagcaactgttacccttatgatgtgccggattatgcctcccttaggtcactagttgcctcatccggcacactggagtttaacaatgaaagcttcaattggactggagtcactcaaaacggaacaagctctgcttgcataaggagatctaataacagtttctttagtagattgaattggttgacccacttaaaattcaaatacccagcattgaacgtgactatgccaaacaatgaaaaatttgacaaattgtacatttggggggttcaccacccgggtacggacaatgaccaagtcttcctgtatgctcaagcatcaggaagaatcacagtctctaccaaaagaagccaacaaactgtaatcccgaatatcggatctagacccagagtaaggaatatccccagcagaataagcatctattggacaatagtaaaaccgggagacatacttttgattaacagcacagggaatctaattgctcctaggggttacttcaaaatacgaagtgggaaaagctcaataatgagatcagatgcacccattggcaaatgcaattctgaatgcatcactccaaatggaagcattcccaatgacaaaccattccaaaatgtaaacaggatcacatacggggcctgtcccagatatgttaagcaaaacactctgaaattggcaacagggatgcgaaatgtaccagagaaacaaactagaggcatatttggcgcaatcgcgggtttcatagaaaatggttgggagggaatggtggatggttggtacggtttcaggcatcaaaattctgagggaataggacaagcagcagatctcaaaagcactcaagcagcaatcgatcaaatcaatgggaagctgaataggttgatcgggaaaaccaacgagaaattccatcagattgaaaaagaattctcagaagtcgaagggagaattcaggaccttgagaaatatgttgaggacaccaaaatagatctctggtcatacaacgcggagcttcttgttgccctggagaaccaacatacaattgatctaactgactcagaaatgaacaaactgtttgaaaaaacaaagaagcaactgagggaaaatgctgaggatatgggaaatggttgtttcaaaatataccacaaatgtgacaatgcctgcataggatcaatcagaaatggaacttatgaccacgatgtatacagagatgaagcattaaacaaccggttccagatcaagggcgttgagctgaagtcaggatacaaagattggatcctatggatttcctttgccatatcatgttttttgctttgtgttgctttgttggggttcatcatgtgggcctgccaaaaaggcaacattaggtgcaacatttgcatttga

SEQ ID NO: 32559 - RNA, 1698 nt, synthetic construct
  misc_feature 1..1698: note = hemagglutinin__InfluenzaA__ABW40312
  source 1..1698: mol_type = other RNA
atgaaagtaaaactactggttctgttatgtacatttacagctacatatgcagacacaatatgtataggctaccatgccaacaactcgaccgacactgttgacacagtacttgagaagaatgtgacagtgacacactctgtcaacctacttgaggacagtcacaatggaaaactatgtctactaaaaggaatagccccactacaattgggtaattgcagcgttgccggatggatcttaggaaacccagaatgcgaattactgatttccaaggaatcatggtcctacattgtagagacaccaaatcctgagaatggaacatgttacccagggtatttcgccgactatgaggagctgagagagcaattgagttcagtatcttcatttgagaggttcgaaatattccccaaagagagctcatggcccaaccacaccgtaaccggagtatcagcatcatgctcccataacgggagaagcagtttttacagaaatttgctatggctgacggggaagaatggtttgtatccaaacctgagcaagtcctatgcaaacaacaaagagaaagaagtccttgtactgtggggtgttcatcacccgcctaacataggggaccaaagggccctctatcatacagaaaatgcttatgtttctgtagtttcttcacattatagcagaagattcaccccagaaatagccaaaagacccaaggtgagagatcaggaaggaagaatcaactactactggactctgcttgaacccggggatacaataatatttgaggcaaatggaaatctaatagcgccaaggtttgctttcgcactgagtagaggctttggatcaggaatcatcacctcaaatgcaccaatggatgaatgtgatgcgaaatgtcaaacacctcagggagctataaacagcagtcttcctttccagaatgtacacccagtcacaataggagagtgtccaaagtatgtcaggagtacaaaattaagaatggttacaggactaaggaacatcccatccattcaatccagaggtttgtttggagccattgccggtttcattgaaggggggtggactggaatggtagatggttggtatggttatcaccatcagaatgagcaaggatctgggtatgctgcagatcaaaaaagcacacaaaatgccattaacgggattacaaacaaggtgaattctgtaattgagaaaatgaacactcaattcacagctgtgggcaaagaattcaacaaattggaaagaaggatggaaaacttaaataaaaaagttgatgatgggtttctagacatttggacatataacgcagaattgttggttctactggaaaatgaaaggactttggacttccatgactccaacgtgaagaatctgtatgagaaagtaaaaagccaattaaagaataatgccaaagaaataggaaacgggtgttttgaattctatcacaagtgtaacgatgaatgcatggagagtgtgaaaaatggaacttatgactatccaaaatattccgaagaatcaaagttgaacagggagaaaattgatggagtgaaattggaatcaatgggagtctatcagattttggcgatctactcaacagtcgccagttccctggttcttttggtctccctgggggcaatcagcttctggatgtgttccaatgggtctttgcagtgtagaatatgcatctaa

SEQ ID NO: 32560 - RNA, 1701 nt, synthetic construct
  misc_feature 1..1701: note = hemagglutinin__InfluenzaA__ABW40323
  source 1..1701: mol_type = other RNA
atgaagactatcattgctttgagctacattctatgtctggttttcgctcaaaaacttcccggaaatgacaacagcacggcaacgctgtgccttgggcaccatgcagtaccaaacggaacgatagtgaaaacaatcacgaatgaccaaattgaagttactaatgctactgagctggttcagagttcctcaacaggtgaaatatgcgacagtcctcatcagatccttgatggagaaaactgcacactaatagatgctctattgggagaccctcagtgtgatggcttccaaaataagaaatgggacctttttgttgaacgcagcaaagcctacagcaactgttacccttatgatgtgccggattatgcctcccttaggtcactagttgcctcatccggcacactggagtttaacaatgaaagcttcaattggactggagtcactcaaaacggaacaagctctgcttgcataaggagatctaataacagtttctttagtagattgaattggttgacccacttaaaattcaaatacccagcattgaacgtgactatgccaaacaatgaaaaatttgacaaattgtacatttggggggttcaccacccgggtacggacaatgaccaaatcttcctgtatgctcaagcatcaggaagaatcacagtctctaccaaaagaagccaacaaactgtaatcccgaatatcggatctagacccagagtaaggaatatccccagcagaataagcatttattggacaatagtaaaaccgggagacatacttttgattaacagcacagggaatctaattgctcctaggggttacttcaaaatacgaagtgggaaaagctcaataatgagatcagatgcacccattggcaaatgcaattctgaatgcatcactccaaatggaagcattcccaatgacaaaccattccaaaatgtaaacaggatcacatacggggcctgtcccagatatgttaagcaaaacactctgaaattggcaacagggatgcgaaatgtaccagagaaacaaactagaggcatatttggcgcaatcgcgggtttcatagaaaatggttgggagggaatggtggatggttggtacggtttcaggcatcaaaattctgagggaataggacaagcagcagatctcaaaagcactcaagcagcaatcgatcaaatcaatgggaagctgaataggttgatcgggaaaaccaacgagaaattccatcagattgaaaaagaattctcagaagtcgaagggagaattcaggaccttgagaaatatgttgaggacaccaaaatagatctctggtcatacaacgcggagcttcttgttgccctggagaaccaacatacaattgatctaactgactcagaaatgaacaaactgtttgaaaaaacaaagaagcaactgagggaaaatgctgaggatatgggcaatggttgtttcaaaatataccacaaatgtgacaatgcctgcataggatcaatcagaaatggaacttatgaccacgatgtatacagagatgaagcattaaacaaccggttccagatcaagggcgttgagctgaagtcaggatacaaagattggatcctatggatttcctttgccatatcatgttttttgctttgtgttgctttgttggggttcatcatgtgggcctgccaaaaaggcaacattaggtgcaacatttgcatttga

SEQ ID NO: 32561 - RNA, 1698 nt, synthetic construct
  misc_feature 1..1698: note = hemagglutinin__InfluenzaA__ABW40334
  source 1..1698: mol_type = other RNA
atgaaagtgaaactactggttctgttatgtacatttacagctacatatgcagacacaatatgtataggctaccatgccaacaactcgaccgacactgttgacacagtacttgagaagaatgtgacagtgacacactctgtcaacctacttgaggaccgtcacaatggaaaactatgtctactaaaaggaatagccccactacaattgggtaattgcagcgttgccggatggatcttaggaaacccagaatgcgaattactgatttccaaggaatcatggtcctacattgtagaaacaccaaatcctgagaatggaacatgttacccagggtatttcgccgactatgaggagctgagggagcaattgagttcagtatcttcatttgagaggttcgaaatattccccaaagagagctcatggcccaaccacaccgtaaccggagtatcagcatcatgctcccataacgggaaaagcagtttttacagaaatttgctatggctgacgggaaagaatggtttgtacccaaacctgagcagatcctatgcaaacaacaaagagaaagaagtccttgtactgtggggtgttcatcacccgcctaacataggggaccaaagggccctctatcatacagaaaatgcttatgtctctgtagtgtcttcacattatagcagaagattcaccccagaaatagccaaaagacccaaggtgagagatcaggaaggaagaatcaattactactggactctactggaacccggggatacaataatatttgaggcaaatgggaatctaatagcgccaaggtttgctttcgcactgagtagaggctttggatcaggaatcatcacctcaaatgcaccaatggatgaatgtgatgcgaagtgtcaaacacctcagggagctataaacagcagtcttcctttccagaatgtacacccagtcacaataggagagtgtccaaagtatgtcaggagtgcaaaattaagaatggttacaggactaaggaacatcccatccattcaatccagaggtttgtttggagccattgccggtttcattgaaggggggtggactggaatggtagacggttggtatggttatcaccaccagaatgagcaaggatctgggtatgctgcagatcaaaaaagcacacaaaatgccattaacgggattacaaacaaggtgaattctgtgattgagaaaatgaacactcaattcacagctgtgggcaaagaattcaacaaattggaaagaagaatggaaaacttaaataaaaaagttgatgatgggtttctagacatttggacgtataacgcagaattgttggttctactggaaaatgaaaggactttggacttccatgactccaacgtgaagaatctgtatgagaaagtaaaaagccaattaaagaataatgccaaagaaataggaaacgggtgttttgaattctatcacaagtgtaacgatgaatgcatggagagtgtgaaaaatggaacttatgactatccaaaatattccgaagaatcaaagttaaacagggagaaaattgatggagtgaaattggaatcaatgggagtctatcagattctggcgatctactcaacagtcgccagttccctggttcttttggtctccctgggggcaatcagcttctggatgtgttccaatgggtctttgcagtgtagaatatgcatctaa

SEQ ID NO: 32562 - RNA, 1698 nt, synthetic construct
  misc_feature 1..1698: note = hemagglutinin__InfluenzaA__ABW40345
  source 1..1698: mol_type = other RNA
atgaaagtgaaactactggttctgttatgtacatttacagctacatatgcagacacaatatgtataggctaccatgccaacaactcgaccgacactgttgacacagtacttgagaagaatgtgacagtgacacactctgtcaacctacttgaggaccgtcacaatggaaaactatgtctactaaaaggaatagccccactacaattgggtaattgcagcgttgccggatggatcttaggaaacccagaatgcgaattactgatttccaaggaatcatggtcttacattgtagaaacaccaaatcctgagaatggaacatgttacccagggtatttcgccgactatgaggagctgagggagcaattgagttcagtatcttcatttgagaggttcgaaatattccccaaagagagctcatggcccaaccacaccgtaaccggagtatcagcatcatgctcccataacgggaaaagcagtttttacagaaatttgctatggctgacgggaaagaatggtttgtacccaaacctgagcagatcctatgcaaacaacaaagagaaagaagtccttgtactgtggggtgttcatcacccgccaaacataggggaccaaagggccctctatcatacagaaaatgcttatgtctctgtagtgtcttcacattatagcagaagattcaccccagaaatagccaaaagacccaaggtgagagatcaggaaggaagaatcaattactactggactctactggaacccggggatacaataatatttgaggcaaatgggaatctaatagcgccaaggtttgctttcgcactgagtagaggctttggatcaggaatcatcacttcaaatgcaccaatggatgaatgtgatgcgaagtgtcaaacacctcagggagctataaacagcagtcttcctttccagaatgtacacccagtcacaataggagagtgtccaaagtatgtcaggagtgcaaaattaagaatggttacaggactaaggaacatcccatccattcaatccagaggtttgtttggagccattgccggtttcattgaaggagggtggactggaatggtagatggttggtatggttatcaccaccagaatgagcaaggatctgggtatgctgcagatcaaaaaagcacacaaaatgccattaacgggattacaaacaaggtgaattctgtgattgagaaaatgaacactcaattcacagctgtgggcaaagaattcaacaaattggaaagaagaatggaaaacttaaataaaaaagttgatgatgggtttctagacatttggacgtataacgcagagttgttggttctactggaaaatgaaaggactttggacttccatgactccaacgtgaagaatctgtatgagaaagtaaaaagccaattaaagaataatgccaaagaaataggaaacgggtgttttgaattctatcacaagtgtaacgatgaatgcatggagagtgtgaaaaatggaacttatgactatccaaaatattccgaagaatcaaagttaaacagggagaaaattgatggagtgaaattggaatcaatgggagtctatcagattctggcgatctactcaacagtcgccagttccctggttcttttggtctccctgggggcaatcagcttctggatgtgttccaatgggtctttgcagtgtagaatatgcatctaa

SEQ ID NO: 32563 - RNA, 1698 nt, synthetic construct
  misc_feature 1..1698: note = hemagglutinin__InfluenzaA__ABW40356
  source 1..1698: mol_type = other RNA
atgaaagtaaaactacttgttctgttatgtacatttacagctacatatgcagacacaatatgtataggctaccatgccaacaactcgaccgacactgttgacacagtacttgagaagaatgtgacagtgacacactctgtcaacctacttgaggacagtcacaatggaaaactatgtctactaaaaggaatagccccactacaattgggtaattgcagcgttgccggatggatcttaggaaacccagaatgcgaattactgatttccaaggaatcatggtcctacattgtagaaacaccaaatcctgaaaatggaacatgttacccaggatatttcgccgactatgaggagctgagggagcaattgagttcagtatcttcatttgagaggttcgaaatattccccaaagagagctcatggcccaaccacaccgtaaccggagtatcagcatcatgctcccataacgggaaaagcagtttttacagaaatttgctatggctgacggggaagaatggtttgtatccaaacctgagcaagtcctatgcaaacaacaaagagaaagaagtccttgtaatgtggggtgttcatcacccgcctaacataggggaccaaagggccctctatcatacagaaaatgcttatgtctctgtagtgtcttcacattatagcagaagattcaccccagaaatagccaaaagacccaaggtgagagatcaggaaggaagaatcaactactactggactctgctggaacccggggatacaataatatttgaggcaaatggaaatctaatagcgccaaggtttgctttcgcactgagtagaggctttggatcaggaatcatcacctcaaatgcaccaatgggtgaatgtgatgcgaagtgtcaaacacctcagggagctataaacagtagtcttcctttccagaatgtacacccagtcacaataggagagtgtccaaagtatgtcaggagtgcaaaattaagaatggttacaggactaaggaacatcccatccattcaatccagaggtttgtttggagccattgccggtttcattgaaggggggtggactggaatggtagatggttggtatggttatcaccatcagaatgagcaaggatctgggtatgctgcagatcaaaaaagcacacaaaatgccattaacgggattacaaacaaggtgaattctgtaattgagaaaatgaacactcaattcacagctgtgggcaaagaattcaacaaattggaaagaaggatggaaaacttaaataaaaaggttgatgatgggtttctagacatttggacatataacgcagaattgttggttctactggaaaatgaaaggactttggacttccatgactccaacgtgaagaatctgtatgagaaagtaaaaagccaattaaagaataatgccaaagaaataggaaacgggtgttttgaattctatcacaagtgtaacgatgaatgcatggagagtgtgaaaaatggaacttatgactacccaaaatattccgaagaatcaaagttgaacagggagaaaattgatggagtgaaattggaatcaatgggagtctatcagattctggcgatctactcaacagtcgccagttccctggttcttttggtctccctgggggcaatcagcttctggatgtgttccaatgggtctttgcagtgtagaatatgcatctaa

SEQ ID NO: 32564 - RNA, 1698 nt, synthetic construct
  misc_feature 1..1698: note = hemagglutinin__InfluenzaA__ABW40367
  source 1..1698: mol_type = other RNA
atgaaagtaaaactactggttctgttatgtacatttacagctacatatgcagacacaatatgtataggctaccatgccaacaactcgaccgacactgttgacacagtacttgagaagaatgtgacagtgacacactctgtcaacctacttgaggacagtcacaatggaaaactatgtctactaaaaggaatagccccactacaattgggtaattgcagcgttgccggatggatcttaggaaacccagaatgcgaattactgatttccaaggaatcatggtcctacattgtagagacaccaaatcctgagaatggaacatgttacccagggtatttcgccgactatgaggagctgagagagcaattgagttcagtatcttcatttgagaggttcgaaatattccccaaagagagctcatggcccaaccacaccgtaaccggagtatcagcatcatgctcccataacgggaaaagcagtttttacagaaatttgctatggctgacggggaagaatggtttgtatccaaacctgagcaagtcctatgcaaacaacaaagagaaagaagtccttgtactgtggggtgttcatcacccgcctaacataggggaccaaagggccctctatcatacagaaaatgcttatgtctctgtagtgtcttcacattatagcagaagattcaccccagaaatagccaaaagacccaaggtgagagatcaggaaggaagaatcaactactactggactctgcttgaacccggggatacaataatatttgaggcaaatggaaatctaatagcgccaaggtttgctttcgcactgagtagaggctttggatcaggaatcatcacctcaaatgcaccaatggatgaatgtgatgcgaaatgtcaaacaccacagggagctataaacagcagtcttcctttccagaatgtacacccagtcacaataggagagtgtccaaagtatgtcaggagtacaaaattaagaatggttacaggactaaggaacatcccatccattcaatccagaggtttgtttggagccattgccggtttcattgaaggggggtggactggaatggtagatggatggtatggttaccaccatcagaatgagcaaggatctgggtatgctgctgatcaaaaaagcacacaaaatgccattaacgggattacaaacaaggtgaattctgtaattgagaaaatgaacactcaattcacagctgtgggcaaagaattcaacaaattggaaagaaggatggaaaacttaaataaaaaagttgatgatgggtttctagacatttggacatataacgcagaattgttggttctactggaaaatgaaaggactttggacttccatgactccaacgtgaagaatctgtatgagaaagtaaaaagccaattaaagaataatgccaaagaaataggaaacgggtgttttgaattctatcacaagtgtaacgatgaatgcatggagagtgtgaaaaatggaacttatgactatccaaaatattccgaagaatcaaagttgaacagggagaaaattgatggagtgaaattggaatcaatgggagtctatcagattttggcgatctactcaacagtcgccagttccctggttcttttggtctccctgggggcaatcagcttctggatgtgttccaatgggtctttgcagtgtagaatatgcatctaa

SEQ ID NO: 32565 - RNA, 1701 nt, synthetic construct; identical to SEQ ID NO: 32445
  misc_feature 1..1701: note = hemagglutinin__InfluenzaA__ABW40378
  source 1..1701: mol_type = other RNA

SEQ ID NO: 32566 - RNA, 1698 nt, synthetic construct
  misc_feature 1..1698: note = hemagglutinin__InfluenzaA__ABW40389
  source 1..1698: mol_type = other RNA
atgaaagtaaaactactagttctgttatgtacatttacagctacatatgcagacacaatatgtataggctaccatgccaacaactcgaccgacactgttgacacagtacttgagaagaatgtgacagtgacacactctgtcaacctacttgaggacagtcacaatggaaaactatgtctactaaaaggaatagccccactacaattgggtaattgcagcgttgccggatggatcttaggaaacccagaatgcgaattactgatttccaaggaatcatggtcctacattgtagagacaccaaatcctgagaatggaacatgttacccagggtattttgccgactatgaggagctgagagagcaattgagttcagtatcttcatttgagaggttcgaaatattccccaaagagagctcatggcccaaccacaccgtaaccggagtatcagcatcatgctcccataacgggaaaagcagtttttacagaaatttgctatggctgacggggaagaatggtttgtatccaaacctgagcaagtcctatgcaaacaacaaagagaaagaagtccttgtactgtggggtgttcatcacccgcctaacataggggaccaaagggccctctatcatacagaaaatgcttatgtctctgtagtgtcttcacattatagcagaagattcaccccagaaatagccaaaagacccaaggtgagagatcaggaaggaagaatcaactactactggactctgcttgaacccggggatacaataatatttgaggcaaatggaaatctaatagcgccaaggtttgctttcgcactgagtagaggctttggatcaggaatcatcacctcaaatgcaccaatggatgaatgtgatgcgaaatgtcaaacacctcagggagctataaacagcagtcttcctttccagaatgtacacccagtcacaataggagagtgtccaaagtatgtcaggagtacaaaattaagaatggttacaggactaaggaacatcccatccattcaatccagaggtttgtttggagccattgccggtttcattgaaggggggtggactggaatggtagatggttggtatggttatcaccatcagaatgagcaaggatctgggtatgctgctgatcaaaaaagcacacaaaatgccattaacgggattacaaacaaggtgaactctgtaattgagaaaatgaacactcaattcacagctgtgggcaaagaattcaacaaattggaaagaaggatggaaaacttaaataaaaaagttgatgatgggtttctagacatttggacatataacgcagaattgttggttctactggaaaatgaaaggactttggacttccatgactccaacgtgaagaatctgtatgagaaagtaaaaagccaattaaagaataatgccaaagaaataggaaacgggtgttttgaattctatcacaagtgtaacgatgaatgcatggagagtgtgaaaaatggaacttatgactatccaaaatattccgaagaatcaaagttgaacagggagaaaattgatggagtgaaattggaatcaatgggagtctatcagattttggcgatctactcaacagtcgccagttccctggttcttttggtctccctgggggcaatcagcttctggatgtgttccaatgggtctttgcagtgtagaatatgcatctaa

SEQ ID NO: 32567 - RNA, 1698 nt, synthetic construct; identical to SEQ ID NO: 32424
  misc_feature 1..1698: note = hemagglutinin__InfluenzaA__ABW40400
  source 1..1698: mol_type = other RNA

SEQ ID NO: 32568 - RNA, 1698 nt, synthetic construct; identical to SEQ ID NO: 32430
  misc_feature 1..1698: note = hemagglutinin__InfluenzaA__ABW40411
  source 1..1698: mol_type = other RNA

SEQ ID NO: 32569 - RNA, 1698 nt, synthetic construct; identical to SEQ ID NO: 32430
  misc_feature 1..1698: note = hemagglutinin__InfluenzaA__ABW40422
  source 1..1698: mol_type = other RNA

SEQ ID NO: 32570 - RNA, 1698 nt, synthetic construct
  misc_feature 1..1698: note = hemagglutinin__InfluenzaA__ABW40433
  source 1..1698: mol_type = other RNA
atgaaagtgaaactactggttctgttatgtacatttacagctacatatgcagacacaatatgtataggctaccatgccaacaactcgaccgacactgttgacacagtacttgagaagaatgtgacagtgacacactctgtcaacctacttgaggaccgtcacaatggaaaactatgtctactaaaaggaatagccccactacaattgggtaattgcagcgttgccggatggatcttaggaaacccagaatgcgaattactgatttccaaggaatcatggtcctacatcgtagaaacaccaaatcctgagaatggaacatgttacccagggtatttcgccgactatgaggagctgagggagcaattgagttcagtatcttcatttgagaggttcgaaatattccccaaagagagctcatggcccaaccacaccgtaaccggagtatcagcatcttgctcccataacgggaaaagcagtttttacagaaatttgctatggctgacgggaaagaatggtttgtacccaaacctgagcagatcctatgcaaacaacaaagagaaagaagtccttgtactgtggggtgttcatcacccgcctaacataggggaccaaagggccctctatcatacagaaaatgcttatgtctctgtagtgtcttcacattatagcagaagattcaccccagaaatagccaaaagacccaaggtgagagatcaggaaggaagaatcaattactactggactctactggaacccggggatacaataatatttgaggcaaatgggaatctaatagcgccaaggtttgctttcgcactgagtagaggctttggatcaggaatcatcacctcaaatgcaccaatggatgaatgtgatgcgaagtgtcaaacacctcagggagctataaacagcagtcttcctttccagaatgtacacccagtcacaataggagagtgtccaaagtatgtcaggagtgcaaaattaagaatggttacaggactaaggaacatcccatccattcaatccagaggtttgtttggagccattgccggtttcattgaaggggggtggactggaatggtagatggttggtatggttatcaccaccagaatgagcaaggatctgggtatgctgcagatcaaaaaagcacacaaaatgccattaacgggattacaaacaaggtgaattctgtgattgagaaaatgaacactcaattcacagctgtgggcaaagaattcaacaaattggaaagaagaatggaaaacttaaataaaaaagttgatgatgggtttctagacatttggacgtataacgcagaattgttggttctactggaaaatgaaaggactttggacttccatgactccaacgtgaagaatctgtatgagaaagtaaaaagccaattaaagaataatgccaaagaaataggaaacgggtgttttgaattctatcacaagtgtaacgatgaatgcatggagagtgtgaaaaatggaacttatgactatccaaaatattccgaagaatcaaagttaaacagggagaaaattgatggagtgaaattggaatcaatgggagtctatcagattctggcgatctactcaacagtcgccagttccctggttcttttggtctccctgggggcaatcagcttctggatgtgttccaatgggtctttgcagtgtagaatatgcatctaa

SEQ ID NO: 32571 - RNA, 1698 nt, synthetic construct
  misc_feature 1..1698: note = hemagglutinin__InfluenzaA__ABW40444
  source 1..1698: mol_type = other RNA
atgaaagtaaaactacttgttctgttatgtacatttacagctacatatgcagacacaatatgtataggctaccatgccaacaactcgaccgacactgttgacacagtacttgagaagaatgtgacagtgacacactctgtcaacctacttgaggacagtcacaatggaaaactatgtctactaaaaggaatagccccactacaattgggtaattgcagcgttgccggatggatcttaggaaacccagaatgcgaattactgatttccaaggaatcatggtcctacattgtagaaacaccaaatcctgagaatggaacatgttacccaggatatttcgccgactatgaggagctgagggagcaattgagttcagtatcttcatttgagaggttcgaaatattccccaaagagagctcatggcccaaccacaccgtaaccggagtatcagcatcatgctcccataacgggaaaagcagtttttacagaaatttgctatggctgacggggaagaatggtttgtatccaaacctgagcaagtcctatgcaaacaacaaagagaaagaagtccttgtactgtggggtgttcatcacccgcctaacataggggaccaaagggccctctatcatacagaaaatgcttatgtctctgtagtgtcttcacattatagcagaagattcaccccagaaatagccaaaagacccaaggtgagagatcaggaaggaagaatcaactactactggactctgctggaacccggggatacaataatatttgaggcaaatggaaatctaatagcgccaaggtttgctttcgcactgagtagaggctttggatcaggaatcatcacctcaaatgcaccaatgggtgaatgtgatgcgaagtgtcaaacacctcagggagctataaacagtagtcttcctttccagaatgtacacccagtcacaataggagagtgtccaaagtatgtcaggagtgcaaaattaagaatggttacaggactaaggaacatcccatccattcaatccagaggtttgtttggagccattgccggtttcattgaaggggggtggactggaatggtagatggttggtatggttatcaccatcagaatgagcaaggatctgggtatgctgcagatcaaaaaagcacacaaaatgccattaacgggattacaaacaaggtgaattctgtaattgagaaaatgaacactcaattcacagctgtgggcaaagaattcaacaaattggaaaggaggatggaaaacttaaataaaaaggttgatgatgggtttctagacatttggacatataacgcagaattgttggttctactggaaaatgaaaggactttggacttccatgactccaacgtgaagaatctgtatgagaaagtaaaaagccaattaaagaataatgccaaagaaataggaaacgggtgttttgaattctatcacaagtgtaacgatgaatgcatggagagtgtgaaaaatggaacttatgactatccaaaatattccgaagaatcaaagttgaacagggagaaaattgatggagtgaaattggaatcaatgggagtctatcagattctggcgatctactcaacagtcgccagttccctggttcttttggtctccctgggggcaatcagcttctggatgtgttccaatgggtctttgcagtgtagaatatgcatctaa

SEQ ID NO: 32572 - RNA, 1698 nt, synthetic construct; identical to SEQ ID NO: 32451
  misc_feature 1..1698: note = hemagglutinin__InfluenzaA__ABW40455
  source 1..1698: mol_type = other RNA

SEQ ID NO: 32573 - RNA, 1698 nt, synthetic construct; identical to SEQ ID NO: 32429
  misc_feature 1..1698: note = hemagglutinin__InfluenzaA__ABW40466
  source 1..1698: mol_type = other RNA

SEQ ID NO: 32574 - RNA, 1698 nt, synthetic construct; identical to SEQ ID NO: 32465
  misc_feature 1..1698: note = hemagglutinin__InfluenzaA__ABW40477
  source 1..1698: mol_type = other RNA

SEQ ID NO: 32575 - RNA, 1698 nt, synthetic construct; identical to SEQ ID NO: 32489
  misc_feature 1..1698: note = hemagglutinin__InfluenzaA__ABW40488
  source 1..1698: mol_type = other RNA

SEQ ID NO: 32576 - RNA, 1698 nt, synthetic construct; identical to SEQ ID NO: 32429
  misc_feature 1..1698: note = hemagglutinin__InfluenzaA__ABW40499
  source 1..1698: mol_type = other RNA

SEQ ID NO: 32577 - RNA, 1698 nt, synthetic construct
  misc_feature 1..1698: note = hemagglutinin__InfluenzaA__ABW40510
  source 1..1698: mol_type = other RNA
atgaaagtgaaactactggttctgttatgtacatttacagctacatatgcagacacaatatgtataggctaccatgccaacaactcgaccgacactgttgacacagtacttgagaagaatgtgacagtgacacactctgtcaacctacttgaggaccgtcacaatggaaaactatgtctactaaaaggaatagccccactacaattgggtaattgcagcgttgccggatggatcttaggaaacccagaatgcgaattactgatttccaaggaatcatggtcctacattgtagaaacaccaaatcctgagaatggaacatgttacccagggtatttcgccgactatgaggagctgagggagcaattgagttcagtatcttcatttgagaggttcgaaatattccccaaagagagctcatggcccaaccacaccgtaaccggagtatcagcatcatgctcccataacgggaaaagcagtttttacagaaatttgctatggctgacgggaaagaatggtttgtacccaaacctgagcagatcctatgcaaacaacaaagagaaagaagtccttgtactgtggggtgttcatcacccgcctaacataggggaccaaagggccctctatcatacagaaaatgcttatgtctctgtagtgtcttcacattatagcagaagattcaccccagaaatagccaaaagacccaaggtgagagatcaggaaggaagaatcaattactactggactctactggaacccggggatacaataatatttgaggcaaatgggaatctaatagcgccaaggtttgctttcgcactgagtagaggctttggatcaggaatcatcacctcaaatgcaccaatggatgaatgtgatgcgaagtgtcaaacacctcagggagctataaacagcagtcttcctttccagaatgtacacccagtcacaataggagagtgtccaaagtatgtcaggagtgcaaaattaagaatggttacaggactaaggaacatcccatccattcaatccagaggtttgtttggagccattgccggtttcattgaaggggggtggactggaatggtagatggttggtatggttatcaccaccagaatgagcaaggatctgggtatgctgcagatcaaaaaagcacacaaaatgccattaacgggattacaaacaaggtgaattctgtgattgagaaaatgaacactcaattcacagctgtgggcaaagaattcaacaaattggaaagaagaatggaaaacttaaataaaaaagttgatgatgggtttctagacatttggacgtataacgcagaattgttggttctactggaaaatgaaaggactttggacttccatgactccaacgtgaagaatctgtatgagaaagtaaaaagccaattaaagaataatgccaaagaaataggaaacgggtgttttgaattctatcacaagtgtaacgatgaatgcatggagagtgtgaaaaatggaacttatgactatccaaaatattccgaagaatcaaagttaaacagggagaaaattgatggagtgaaattggaatcaatgggagtctatcagattctggcgatctactcaacagtcgccagttccctggttcttttggtctccctgggggcaatcagcttctggatgtgttccaatgggtctttgcagtgtagaatatgcatctaa

SEQ ID NO: 32578 - RNA, 1698 nt, synthetic construct; identical to SEQ ID NO: 32486
  misc_feature 1..1698: note = hemagglutinin__InfluenzaA__ABW40521
  source 1..1698: mol_type = other RNA

SEQ ID NO: 32579 - RNA, 1698 nt, synthetic construct; identical to SEQ ID NO: 32429
  misc_feature 1..1698: note = hemagglutinin__InfluenzaA__ABW40532
  source 1..1698: mol_type = other RNA

SEQ ID NO: 32580 - RNA, 1698 nt, synthetic construct
  misc_feature 1..1698: note = hemagglutinin__InfluenzaA__ABW40543
  source 1..1698: mol_type = other RNA
atgaaagtgaaactactggttctgttatgtacatttacagctacatatgcagacacaatatgtataggctaccatgccaacaactcgaccgacactgttgacacagtacttgagaagaatgtgacagtgacacactctgtcaacctacttgaggaccgtcacaatggaaaactatgtctactaaaaggaatagccccactacaattgggtaattgcagcgttgccggatggatcttaggaaacccagaatgcgaattactgacttccaaggaatcatggtcctacattgtagaaacaccaaatcctgagaatggaacatgttacccagggtatttcgccgactatgaggagctgagggagcaattgagttcagtatcttcatttgagaggttcgaaatattccccaaagagagctcatggcccaaccacaccgtaaccggagtatcagcatcatgctcccataacgggaaaagcagtttttacagaaatttgctatggctgacgggaaagaatggtttgtacccaaacctgagcaaatcctatgcaaacaacaaagagaaagaagtccttgtactgtggggtgttcatcacccgcctaacataggggaccaaagggccctctatcatacagaaaatgcttatgtctctgtagtgtcttcacattatagcagaagattcaccccagaaatagccaaaagacccaaggtgagagatcaggaaggaagaatcaactactactggactctactggaacccggggatacaataatatttgaggcaaatggaaatctaatagcgccaaggtttgctttcgcactgagtagaggctttggatcaggaatcatcacctcaaatgcaccaatggatgaatgtgatgcgaagtgtcaaacacctcagggagctataaacagcagtcttcctttccagaatgtacacccagtcacaataggagagtgtccaaagtatgtcaggagtgcaaaattaagaatggttacaggactaaggaacatcccatccattcaatccagaggtttgtttggagccattgccggtttcattgaaggggggtggactggaatggtagatggttggtatggttatcaccaccagaatgagcaaggatctgggtatgctgcagatcaaaaaagcacacaaaatgccattaacgggattacaaacaaggtgaattctgtgattgagaaaatgaacactcaattcacagctgtgggcaaagaattcaacaaattggaaagaaggatggaaaacttaaataaaaaggttgatgatgggtttctagacatttggacgtataacgcagaattgttggttctactggaaaatgaaaggactttggacttccatgactccaacgtgaagaatctgtatgagaaagtaaaaagccaattaaagaataatgccaaagaaataggaaacggatgttttgaattctatcacaagtgtaacgatgaatgcatggagagtgtgaaaaatggaacttatgactatccaaaatattccgaagaatcaaagttaaacagggagaaaattgatggagtgaaattggaatcaatgggagtctatcagattctggcgatctactcaacagtcgccagttccctggttcttttggtctccctgggggcaatcagcttctggatgtgttccaatgggtctttgcagtgtagaatatgcatctaa

SEQ ID NO: 32581 - RNA, 1698 nt, synthetic construct; identical to SEQ ID NO: 32559
  misc_feature 1..1698: note = hemagglutinin__InfluenzaA__ABW40554
  source 1..1698: mol_type = other RNA

SEQ ID NO: 32582 - RNA, 1698 nt, synthetic construct; identical to SEQ ID NO: 32418
  misc_feature 1..1698: note = hemagglutinin__InfluenzaA__ABW40565
  source 1..1698: mol_type = other RNA

SEQ ID NO: 32583 - RNA, 1698 nt, synthetic construct
  misc_feature 1..1698: note = hemagglutinin__InfluenzaA__ABW40576
  source 1..1698: mol_type = other RNA
atgaaagtaaaactactgattctgttatgtacatttacagctacatatgcagacacaatatgtataggctaccatgccaacaactcgaccgacactgttgacacagtacttgagaagaatgtgacagtgacacactctgtcaacctacttgaggacagtcacaatggaaaactatgtctactaaaaggaatagccccactacaattgggtaattgcagcgttgccggatggatcttaggaaacccagaatgcgaattgctgatttccaaggaatcatggtcctacattgtagagacaccaaatcctgagaatggaacatgttacccagggtatttcgccgactatgaggagctgagagagcaattgagttcagtatcttcatttgagaggttcgaaatattccccaaagagagctcatggcccaaccacaccgtaaccggagtatcagcatcatgctcccataacgggaaaagcagtttttacagaaatttgctatggctgacggggaagaatggtttgtatccaaacctgagcaagtcctatgcaaacaacaaagagaaagaagtccttgtactgtggggtgttcatcacccgcctaacataggggaccaaagggccctctatcatacagaaaatacttatgtctctgtagtgtcttcacattatagcagaagattcaccccagaaatagccaaaagacccaaggtgagagatcaggaaggaagaatcaactactactggactctgcttgaacccggggatacaataatacttgaggcaaatggaaatctaatagcgccaaggtttgctttcgcactgagtagaggctttggatcaggaatcatcacctcaaatgcaccaatggatgaatgtgatgcgaaatgtcaaacacctcagggagctataaacagcagtcttcctttccagaatgtacacccagtcacaataggagagtgtccaaagtatgtcaggagtacaaaattaagaatggttacaggactaaggaacatcccatccattcaatccagaggtttatttggagccattgccggtttcattgaaggggggtggactggaatggtagatggttggtatggttatcaccatcagaatgagcaaggatctgggtatgctgcagatcaaaaaagcacacaaaatgccattaacgggattacaaacaaggtgaattctgtaattgagaaaatgaacactcaattcacagctgtgggcaaagaattcaacaaattggaaagaaggatggaaaacttaaataaaaaagttgatgatgggtttctagacatttggacatataacgcagaattgttggttctactggaaaatgaaaggactttggacttccatgactccaacgtgaagaatctgtatgagaaagtaaaaagccaattaaagaataatgccaaagaaataggaaacgggtgttttgaattctatcacaagtgtaacgatgaatgcatggagagtgtgaaaaatggaacttatgactatccaaaatattccgaagaatcaaagttgaacagggagaaaattgatggagtgaaattggaatcaatgggagtctatcagattttggcgatctactcaacagtcgccagttccctggttcttttggtctccctgggggcaatcagcttctggatgtgttccaatgggtcgttgcagtgtagaatatgcatctaa

SEQ ID NO: 32584 - RNA, 1701 nt, synthetic construct
  misc_feature 1..1701: note = hemagglutinin__InfluenzaA__ABW40587
  source 1..1701: mol_type = other RNA
atgaagactatcattgctttgagctacattctatgtctggttttcgctcaaaaacttcctggaaatgacaacagcacggcaacgctgtgccttgggcaccatgcagtaccaaacggaacgatagtgaaaacaatcacgaatgaccaaattgaagttactaatgctaccgagctggttcagagttcctcaacaggtgaaatatgcgacagtcctcatcagatccttgatggagaaaactgcacactaatagatgctctattgggagaccctcagtgtgatggcttccaaaataagaaatgggacctttttgttgaacgcagcaaagcctacagcaactgttacccttatgatgtgccggattatgcctcccttaggtcactagttgcctcatccggcacactggagtttaacaatgaaagcttcaattggactggagtcactcaaaacggaacaagctctgcttgcataaggagatctaataacagtttctttagtagattgaattggttgacccacttaaaattcaaatacccagcattgaacgtgactatgccaaacaatgaaaaatttgacaaattgtacatttggggggttcaccacccgggtacggacaatgaccaagtcttcctgtatgctcaagcatcaggaagaatcacagtctctaccaaaagaagccaacaaactgtaatcccgaatatcggatctagacccagagtaaggaatatccccagcagaataagcatctattggacaatagtaaaaccgggagacatacttttgattaacagcacagggaatctaattgctcctaggggttacttcaaaatacgaagtgggaaaagctcaataatgagatcagatgcacccattggcaaatgcaattctgaatgcatcactccaaatggaagcattcccaatgacaaaccattccaaaatgtaaacaggatcacatacggggcctgtcccagatatgttaagcaaaacactctgaaattggcaacagggatgcgaaatgtaccagagaaacaaactagaggcatatttggcgcaatcgcgggtttcatagaaaatggttgggagggaatggtggatggttggtacggtttcaggcatcaaaattctgagggaataggacaagcagcagatctcaaaagcactcaagcagcaatcgatcaaatcaatgggaagctgaataggttgatcgggaaaaccaacgagaaattccatcagattgaaaaagaattctcagaagtcgaagggagaattcaggaccttgagaaatatgttgaggacaccaaaatagatctctggtcatacaacgcggagcttcttgttgccctggagaaccaacatacaattgatctaactgactcagaaatgaacaaactgtttgaaaaaacaaagaagcaactgagggaaaatgctgaggatatgggcaatggttgtttcaaaatataccacaaatgtgacaatgcctgcataggatcaatcagaaatggaacttatgaccacgatgtatacagagatgaagcattaaacaaccggttccagatcaagggcgttgagctgaagtcaggatacaaagattggatcctatggatttcctttgccatatcatgttttttgctttgtgttgctttgttggggttcatcatgtgggcctgccaaaaaggcaacattaggtgcaacatttgcatttga

SEQ ID NO: 32585 - RNA, 1698 nt, synthetic construct
  misc_feature 1..1698: note = hemagglutinin__InfluenzaA__ABW40598
  source 1..1698: mol_type = other RNA
atgaaagtgaaactactggttctgttatgtacatttacagctacatatgcagacacaatatgtataggctaccatgccaacaactcgaccgacactgttgacacagtacttgagaagaatgtgacagtgacacactctgtcaacctacttgaggaccgtcacaatggaaaactatgtctactaaaaggaatagccccactacaattgggtaattgcagcgttgccggatggatcttaggaaacccagaatgcgaattactgatttccaaggaatcatggtcttacattgtagaaacaccaaatcctgagaatggaacatgttacccagggtatttcgccgactatgaggagctgagggagcaattgagttcagtatcttcatttgagaggttcgaaatattccccaaagagagctcatggcccaaccacaccgtaaccggagtatcagcatcatgctcccataacgggaaaagcagtttttacagaaatttgctatggctgacgggaaagaatggtttgtacccaaacctgagcagatcctatgcaaacaacaaagagaaagaagtccttgtactgtggggtgttcatcacccgcctaacataggggaccaaagggccctctatcatacagaaaatgcttatgtctctgtagtgtcttcacattatagcagaagattcaccccagaaatagccaaaagacccaaggtgagagatcaggaaggaagaatcaattactactggactctactggaacccggggatacaataatatttgaggcaaatgggaatctaatagcgccaaggtttgctttcgcactgagtagaggctttggatcaggaatcatcacttcaaatgcaccaatggatgaatgtgatgcgaagtgtcaaacacctcagggagctataaacagcagtcttcctttccagaatgtacacccagtcacaataggagagtgtccaaagtatgtcaggagtgcaaaattaagaatggttacaggactaaggaacatcccatccattcaatccagaggtttgtttggagccattgccggtttcattgaaggagggtggactggaatggtagatggttggtatggttatcaccaccagaatgagcaaggatctgggtatgctgcagatcaaaaaagcacacaaaatgccattaacgggattacaaacaaggtgaattctgtgattgagaaaatgaacactcaattcacagctgtgggcaaagaattcaacaaattggaaagaagaatggaaaacttaaataaaaaagttgatgatgggtttctagacatttggacgtataacgcagagttgttggttctactggaaaatgaaaggactttggacttccatgactccaacgtgaagaatctgtatgagaaagtaaaaagccaattaaagaataatgccaaagaaataggaaacgggtgttttgaattctatcacaagtgtaacgatgaatgcatggagagtgtgaaaaatggaacttatgactatccaaaatattccgaagaatcaaagttaaacagggagaaaattgatggagtgaaattggaatcaatgggagtctatcagattctggcgatctactcaacagtcgccagttccctggttcttttggtctccctgggggcaatcagcttctggatgtgttccaatgggtctttgcagtgtagaatatgcatctaa

SEQ ID NO: 32586 - RNA, 1698 nt, synthetic construct
  misc_feature 1..1698: note = hemagglutinin__InfluenzaA__ABW40609
  source 1..1698: mol_type = other RNA
atgaaagtaaaactacttgttctgttatgtacatttacagctacatatgcagacacaatatgtataggctaccatgccaacaactcgaccgacactgttgacacagtacttgagaagaatgtgacagtgacacactctgtcaacctacttgaggacagtcacaatggaaaactatgtctactaaaaggaatagccccactacaattgggtaattgcagcgttgccggatggatcttaggaaacccagaatgcgaattactgatttccaaggaatcatggtcctacattgtagaaacaccaaatcctgagaatggaacatgttacccaggatatttcgccgactatgaggagctgagggagcaattgagttcagtatcttcatttgagaggttcgaaatattccccaaagagagctcatggcccaaccacaccgtaaccggagtatcagcatcatgctcccataacgggaaaagcagtttttacagaaatttgctatggctgacgggaaagaatggtttgtatccaaacctgagcaagtcctatgcaaacaacaaagagaaagaagtccttgtactgtggggtgttcatcacccgcctaacataggggaccaaagggccctctatcatacagaaaatgcttatgtctctgtagtgtcttcacattatagcagaagattcaccccagaaatagccaaaagacccaaggtgagagatcaggaaggaagaatcaactactactggactctgctggaacccggggatacaataatatttgaggcaaatggaaatctaatagcgccaaggtttgctttcgcactgagtagaggctttggatcaggaatcatcacctcaaatgcaccaatgggtgaatgtgatgcgaagtgtcaaacacctcagggagctataaacagtagtcttcctttccagaatgtacacccagtcacaataggagagtgtccaaagtatgtcaggagtgcaaaattaagaatggttacaggactaaggaacatcccatccattcaatccagaggtttgtttggagccattgccggtttcattgaaggggggtggactggaatggtagatggttggtatggttatcaccatcagaatgagcaaggatctgggtatgctgcagatcaaaaaagcacacaaaatgccattaacgggattacaaacaaggtgaattctgtaattgagaaaatgaacactcaattcacagctgtgggcaaagaattcaacaaattggaaaggaggatggaaaacttaaataaaaaggttgatgatgggtttctagacatttggacatataacgcagaattgttggttctactggaaaatgaaaggactttggacttccatgactccaacgtgaagaatctgtatgagaaagtaaaaagccaattaaagaataatgccaaagaaataggaaacgggtgttttgaattctatcacaagtgtaacgatgaatgcatggagagtgtgaaaaatggaacttatgactatccaaaatattccgaagaatcaaagttgaacagggagaaaattgatggagtgaaattggaatcaatgggagtctatcagattctggcgatctactcaacagtcgccagttccctggttcttttggtctccctgggggcaatcagcttctggatgtgttccaatgggtctttgcagtgtagaatatgcatctaa

SEQ ID NO: 32587 - RNA, 1698 nt, synthetic construct; identical to SEQ ID NO: 32524
  misc_feature 1..1698: note = hemagglutinin__InfluenzaA__ABW40620
  source 1..1698: mol_type = other RNA

SEQ ID NO: 32588 - RNA, 1701 nt, synthetic construct; identical to SEQ ID NO: 32558
  misc_feature 1..1701: note = hemagglutinin__InfluenzaA__ABW40631
  source 1..1701: mol_type = other RNA

SEQ ID NO: 32589 - RNA, 1698 nt, synthetic construct
  misc_feature 1..1698: note = hemagglutinin__InfluenzaA__ABW40642
  source 1..1698: mol_type = other RNA
atgaaagtaaaactactgattctgttatgtacatttacagccacatatgcagacacaatatgtataggctaccatgccaacaactcgaccgacactgttgacacagtacttgagaagaatgtgacagtgacacactctgtcaacctacttgaggacagtcacaatggaaaactatgtctactaaaaggaatagccccactacaattgggtaattgcagcgttgccggatggatcttaggaaacccagaatgcgaattgctgatttccaaggaatcatggtcctacattgtagagacaccaaatcctgagaatggaacatgttacccagggtatttcgccgactatgaggagctgagagagcaattgagttcagtatcttcatttgagaggttcgaaatattccccaaagagagctcatggcccaaccacaccgtaaccggagtatcagcatcatgctcccataacgggaaaagcagtttttacagaaatttgctatggctgacggggaagaatggtttgtatccaaacctgagcaagtcctatgcaaacaacaaagagaaagaagtccttgtactgtggggtgttcatcacccgcctaacataggggaccaaagggccctctatcatacagaaaatgcttatgtctctgtagtgtcttcacattatagcagaagattcaccccagaaatagccaaaagacccaaggtgagagatcaggaaggaagaatcaactactactggactctgcttgaacccggggatacaataatatttgaggcaaatggaaatctaatagcgccaaggtttgctttcgcactgagtagaggctttggatcaggaatcatcacctcaaatgcaccaatggatgaatgtgatgcgaaatgtcaaacacctcagggagctataaacagcagtcttcctttccagaatgtacacccagtcacaataggagagtgtccaaagtatgtcaggagtacaaaattaagaatggttacaggactaaggaacattccatccattcaatccagaggtttatttggagccattgccggtttcattgaaggggggtggactggaatggtagatggttggtatggttatcaccatcagaatgagcaaggatctgggtatgctgcagatcaaaaaagcacacaaaatgccattaacgggattacaaacaaggtgaattctgtaattgagaaaatgaacactcaattcacagctgtgggcaaagaattcaacaaattggaaagaaggatggaaaacttaaataaaaaagttgatgatgggtttctagacatttggacatataacgcagaattgttggttctactggaaaatgaaaggactttggacttccatgactccaacgtgaagaatctgtatgagaaagtaaaaagccaattaaagaataatgccaaagaaataggaaacgggtgttttgaattctatcacaagtgtaacgatgaatgcatggagagtgtgaaaaatggaacttatgactatccaaaatattccgaagaatcaaagttgaacagggagaaaattgatggagtgaaattggaatcaatgggagtctatcagattttggcgatctactcaacagtcgccagttccctggttcttttggtctccctgggggcaatcagcttctggatgtgttccaatgggtctttgcagtgtagaatatgcatctaa

SEQ ID NO: 32590 - RNA, 1701 nt, synthetic construct; identical to SEQ ID NO: 32558
  misc_feature 1..1701: note = hemagglutinin__InfluenzaA__ABW40653
  source 1..1701: mol_type = other RNA

SEQ ID NO: 32591 - RNA, 1698 nt, synthetic construct; identical to SEQ ID NO: 32577
  misc_feature 1..1698: note = hemagglutinin__InfluenzaA__ABW40664
  source 1..1698: mol_type = other RNA

SEQ ID NO: 32592 - RNA, 1698 nt, synthetic construct
  misc_feature 1..1698: note = hemagglutinin__InfluenzaA__ABW40675
  source 1..1698: mol_type = other RNA
atgaaagtaaaactacttgttctgttatgtacatttacagctacatatgcagacacaatatgtataggctaccatgccaacaactcgaccgacactgttgacacagtacttgagaagaatgtgacagtgacacactctgtcaacctacttgaggacagtcacaatggaaaactatgtctactaaaaggaatagccccactacaattgggtaattgcagcgttgccggatggatcttaggaaacccagaatgcgaattactgatttccaaggaatcatggtcctacattgtagaaacaccaaatcctgagaatggaacatgttacccaggatatttcgccgactatgaggagctgagggagcaattgagttcagtatcttcatttgagaggttcgaaatattccccaaagagagctcatggcccaaccacaccgtaaccggagtatcagcatcatgctcccataacgggaaaagcagtttttacagaaatttgctatggctgacggggaagaatggtttgtatccaaacctgagcaagtcctatgcaaacaacaaagagaaagaagtccttgtactgtggggtgttcatcacccgcctaacataggggaccaaagggccctctatcatacagaaaatgcttatgtctctgtagtgtcttcacattatagcagaagattcaccccagaaatagccaaaagacccaaggtgagagatcaggaaggaagaatcaactactactggactctgctggaacccggggatacaataatatttgaggcaaatggaaatctaatagcgccaaggtttgctttcgcactgagtagaggctttggatcaggaatcatcacctcaaatgcaccaatgggtgaatgtgatgcgaagtgtcaaacacctcagggagctataaacagtagtcttcctttccagaatgtacatccagtcacaataggagagtgtccaaagtatgtcaggagtgcaaaattaagaatggttacaggactaaggaacatcccatccattcaatccagaggtttgtttggagccattgccggtttcattgaaggggggtggactggaatggtagatggttggtatggttatcaccatcagaatgagcaaggatctgggtatgctgcagatcaaaaaagcacacaaaatgccattaacgggattacaaacaaggtgaattctgtaattgagaaaatgaacactcaattcacagctgtgggcaaagaattcaacaaattggaaagaaggatggaaaacttaaataaaaaggttgatgatgggtttctagacatttggacatataacgcagaattgttggttctactggaaaatgaaaggactttggacttccatgactccaacgtgaagaatctgtatgagaaagtaaaaagccaattaaagaataatgccaaagaaataggaaacgggtgttttgaattctatcacaagtgtaacgatgaatgcatggagagtgtgaaaaatggaacttatgactatccaaaatattccgaagaatcaaagttgaacagggagaaaattgatggagtgaaattggaatcaatgggagtctatcagattctggcgatctactcaacagtcgccagttccctggttcttttggtctccctgggggcaatcagcttctggatgtgttccaatgggtctttgcagtgtagaatatgcatctaa

SEQ ID NO: 32593 - RNA, 1698 nt, synthetic construct
  misc_feature 1..1698: note = hemagglutinin__InfluenzaA__ABW71294
  source 1..1698: mol_type = other RNA
atgaaagtaaaactacttgttctgttatgtacatttacagctacatatgcagacacaatatgtataggctaccatgccaacaactcgaccgacactgttgacacagtacttgagaagaatgtgacagtgacacactctgtcaacctacttgaggacagtcacaatggaaaactatgtctactaaaaggaatagccccactacaattgggtaattgcagcgttgccggatggatcttaggaaacccagaatgcgaattactgatttccaaggaatcatggtcctacattgtagaaacaccaaatcctgagaatggaacatgttacccaggatatttcgccgactatgaggagctgagggagcaattgagttcagtatcttcatttgagaggttcgaaatattccccaaagagagctcatggcccaaccacaccgtaaccggagtatcagcatcatgctcccataacgggaaaagcagtttttacagaaatttgctatggctgacggggaagaatggtttgtatccaaacctgagcaagtcctatgcaaacaacaaagagaaagaagtccttgtaatgtggggtgttcatcacccgcctaacataggggaccaaagggccctctatcatacagaaaatgcttatgtctctgtagtgtcttcacattatagcagaagattcaccccagaaatagccaaaagacccaaggtgagagatcaggaaggaagaatcaactactactggactctgctggaacccggggatacaataatatttgaggcaaatggaaatctaatagcgccaaggtttgctttcgcactgagtagaggctttggatcaggaatcatcacctcaaatgcaccaatgggtgaatgtgatgcgaagtgtcaaacacctcagggagctataaacagtagtcttcctttccagaatgtacacccagtcacaataggagagtgtccaaagtatgtcaggagtgcaaaattaagaatggttacaggactaaggaacatcccatccattcaatccagaggtttgtttggagccattgccggtttcattgaaggggggtggactggaatggtagatggttggtatggttatcaccatcagaatgagcaaggatctgggtatgctgcagatcaaaaaagcacacaaaatgccattaacgggattacaaacaaggtgaattctgtaattgagaaaatgaacactcaattcacagctgtgggcaaagaattcaacaaattggaaagaaggatggaaaacttaaataaaaaggttgatgatgggtttctagacatttggacatataacgcagaattgttggttctactggaaaatgaaaggactttggacttccatgactccaacgtgaagaatctgtatgagaaagtaaaaagccaattaaagaataatgccaaagaaataggaaacgggtgttttgaattctatcacaagtgtaacgatgaatgcatggagagtgtgaaaaatggaacttatgactatccgaaatattccgaagaatcaaagttgaacagggagaaaattgatggagtgaaattggaatcaatgggagtctatcagattctggcgatctactcaacagtcgccagttccctggttcttttggtctccctgggggcaatcagcttctggatgtgttccaatgggtctttgcagtgtagaatatgcatctaa

SEQ ID NO: 32594 - RNA, 1698 nt, synthetic construct
  misc_feature 1..1698: note = hemagglutinin__InfluenzaA__ABW71305
  source 1..1698: mol_type = other RNA
atgaaagtgaaactactggttctgttatgtacatttacagctacatatgcagacacaatatgtataggctaccatgccaacaactcgaccgacactgttgacacagtacttgagaagaatgtgacagtgacacactctgtcaacctacttgaggaccgtcacaatggaaaactatgtctactaaaaggaatagccccactacaattgggtaattgcagcgttgccggatggatcttaggaaacccagaatgcgaattactgatttccaaggaatcatggtcctacattgtagaaacaccaaatcctgagaatggaacatgttacccagggtatttcgccgactatgaggagctgagggagcaattgagttcagtatcttcatttgagaggttcgaaatattccccaaagagagctcatggcccaaccacaccgtaaccggagtatcagcatcttgctcccataacgggaaaagcagtttttacagaaatttgctatggctgacgggaaagaatggtttgtacccaaacctgagcagatcctatgcaaacaacaaagagaaagaagtccttgtactgtggggtgttcatcacccgcctaacataggggaccaaagggccctctatcatacagaaaatgcttatgtctctgtagtgtcttcacattatagcagaagattcaccccagaaatagccaaaagacccaaggtgagagatcaggaaggaagaatcaattactactggactctactggaacccggggatacaataatatttgaggcaaatgggaatctaatagcgccaaggtttgctttcgcactgagtagaggctttggatcaggaatcatcacctcaaatgcaccaatggatgaatgtgatgcgaagtgtcaaacacctcagggagctataaacagcagtcttcctttccagaatgtacacccagtcacaataggagagtgtccaaagtatgtcaggagtgcaaaattaagaatggttacaggactaaggaacatcccatccattcaatccagaggtttgtttggagccattgccggtttcattgaaggggggtggactggaatggtagatggttggtatggttatcaccaccagaatgagcaaggatctgggtatgctgcagatcaaaaaagcacacaaaatgccattaacgggattacaaacaaggtgaattctgtgattgagaaaatgaacactcaattcacagctgtgggcaaagaattcaacaaattggaaagaagaatggaaaacttaaataaaaaagttgatgatgggtttctagacatttggacgtataacgcagaattgttggttctactggaaaatgaaaggactttggacttccatgactccaacgtgaagaatctgtatgagaaagtaaaaagccaattaaagaataatgccaaagaaataggaaacgggtgttttgaattctatcacaagtgtaacgatgaatgcatggagagtgtgaaaaatggaacttatgactatccaaaatattccgaagaatcaaagttaaacagggagaaaattgatggagtgaaattggaatcaatgggagtctatcagattctggcgatctactcaacagtcgccagttccctggttcttttggtctccctgggggcaatcagcttctggatgtgttccaatgggtctttgcagtgtagaatatgcatctaa

SEQ ID NO: 32595 - RNA, 1698 nt, synthetic construct
  misc_feature 1..1698: note = hemagglutinin__InfluenzaA__ABW71316
  source 1..1698: mol_type = other RNA
atgaaagtaaaactactgattctgttatgtacatttacagctacatatgcagacacaatatgtataggctaccatgccaacaactcgaccgacactgttgacacagtacttgagaagaatgtgacagtgacacactctgtcaacctacttgaggacagtcacaatggaaaactatgtctactaaaaggaatagccccactacaattgggtaattgcagcgttgccggatggatcttaggaaacccagaatgcgaattgctgatttccaaggaatcatggtcctacattgtagagacaccaaatcctgagaatggaacatgttacccagggtatttcgccgactatgaggagctgagagagcaattgagttcagtatcttcatttgagaggttcgaaatattccccaaagagagctcatggcccaaccacaccgtaaccggagtatcagcatcatgctcccataacgggaaaagcagtttttacagaaatttgctatggctgacggggaagaatggtttgtatccaaacctgagcaagtcctatgcaaacaacaaagagaaagaagtccttgtactgtggggtgttcatcacccgcctaacataggggaccaaagggccctctatcatacagaaaatgcttatgtctctgtagtgtcttcacattatagcagaagattcaccccagaaatagccaaaagacccaaggtgagagatcaggaaggaagaatcaactactactggactctgcttgaacccagggatacaataatatttgaggcaaatggaaatctaatagcgccaaggtttgctttcgcactgagtagaggctttggatcaggaatcatcacctcaaatgcaccaatggatgaatgtgatgcgaaatgtcaaacacctcagggagctataaacagcagtcttcctttccagaatgtacacccagtcacaataggagagtgtccaaagtatgtcaggagtacaaaattaagaatggttacaggactaaggaacatcccatccattcaatccagaggtttatttggagccattgccggtttcattgaaggggggtggactggaatggtagatggttggtatggttatcaccatcagaatgagcaaggatctgggtatgctgcagatcaaaaaagcacacaaaatgccattaacgggattacaaacaaggtgaattctgtaattgagaaaatgaacactcaattcacagctgtgggcaaagaattcaacaaattggaaagaaggatggaaaacttaaataaaaaagttgatgatgggtttctagacatttggacatataacgcagaattgttggttctactggaaaatgaaaggactttggacttccatgactccaacgtgaagaatctgtatgagaaagtaaaaagccaattaaagaataatgccaaagaaataggaaacgggtgttttgaattctatcacaagtgtaacgatgaatgcatggagagtgtgaaaaatggaacttatgactatccaaaatattccgaagaatcaaagttgaacagggagaaaattgatggagtgaaattggaatcaatgggagtctatcagattttggcgatctactcaacagtcgccagttccctggttcttttggtctccctgggggcaatcagcttctggatgtgttccaatgggtctttgcagtgtagaatatgcatctaa

SEQ ID NO: 32596 - RNA, 1698 nt, synthetic construct; identical to SEQ ID NO: 32440
  misc_feature 1..1698: note = hemagglutinin__InfluenzaA__ABW71327
  source 1..1698: mol_type = other RNA

SEQ ID NO: 32597 - RNA, 1698 nt, synthetic construct
  misc_feature 1..1698: note = hemagglutinin__InfluenzaA__ABW71338
  source 1..1698: mol_type = other RNA
atgaaagtaaaactactggttctgttatgtacatttacagctacatatgcagacacaatatgtataggctaccatgccaacaactcgaccgacactgttgacacagtacttgagaagaatgtgacagtgacacactctgtcaacctacttgaggacagtcacaatggaaaactatgtctactaaaaggaatagccccactacaattgggtaattgcagcgttgccggatggatcttaggaaacccagaatgcgaattactgatttccaaggaatcatggtcctacattgtagagacaccaaatcctgagaatggaacatgttacccagggtatttcgctgactatgaggagctgagagagcaattgagttcagtatcttcatttgagaggttcgaaatattccccaaagagagctcatggcccaaccacaccgtaaccggagtatcagcatcatgctcccataacgggaaaagcagtttttacagaaatttgctatggctgacggggaagaatggtttgtatccaaacctgagcaagtcctatgcaaacaacaaagagaaagaagtccttgtactgtggggtgttcatcacccgcctaacataggggaccaaagggccctctatcatacagaaaatgcttatgtctctgtagtgtcttcacattatagcagaagattcaccccagaaatagccaaaagacccaaggtgagagatcaggaaggaagaatcaactactactggactctgcttgaacccggggatacaataatatttgaggcaaatggaaatctaatagcgccaaggtttgctttcgcactgagtagaggctttggatcaggaatcatcacctcaaatgcaccaatggatgaatgtgatgcgaaatgtcaaacacctcagggagctataaacagcagtcttcctttccagaatgtacacccagtcacaataggagagtgtccaaagtatgtcaggagtacaaaattaagaatggttacaggactaaggaacatcccatccattcaatccagaggtttgtttggagccattgccggtttcattgaaggggggtggactggaatggtagatggttggtatggttatcaccatcagaatgagcaaggatctgggtatgctgctgatcaaaaaagcacacaaaatgccattaacgggattacaaacaaggtgaattctgtaattgagaaaatgaacactcaattcacagctgtgggcaaagaattcaacaaattggaaagaaggatggaaaacttaaataaaaaagttgatgatggatttctagacatttggacatataacgcagaattgttggttctactggaaaatgaaaggactttggacttccatgactccaacgtgaagaatctgtatgagaaagtaaaaagccaattaaagaataatgccaaagaaataggaaacgggtgttttgaattctatcacaagtgtaacgatgaatgcatggagagtgtgaaaaatggaacttatgactatccaaaatattccgaagaatcaaagttgaacagggagaaaattgatggagtgaaattggaatcaatgggagtctatcagattttggcgatctactcaacagtcgccagttccctggttcttttggtctccctgggggcaatcagcttctggatgtgttccaatgggtctttgcagtgtagaatatgcatctaa

SEQ ID NO: 32598 - RNA, 1701 nt, synthetic construct; identical to SEQ ID NO: 32472
  misc_feature 1..1701: note = hemagglutinin__InfluenzaA__ABW71349
  source 1..1701: mol_type = other RNA

SEQ ID NO: 32599 - RNA, 1698 nt, synthetic construct
  misc_feature 1..1698: note = hemagglutinin__InfluenzaA__ABW71360
  source 1..1698: mol_type = other RNA
atgaaagtgaaactactggttctgttatgtacatttacagctacatatgcagacacaatatgtataggctaccatgccaacaactcgaccgacactgttgacacagtacttgagaagaatgtgacagtgacacactctgtcaacctacttgaggaccgtcacaatggaaaactatgtctactaaaaggaatagccccactacaattgggtaattgcagcgttgccggatggatcttaggaaacccagaatgcgaattactgatttccaaggaatcatggtcctacattgtagaaacaccaaatcctgagaatggaacatgttacccagggtatttcgccgactatgaggagctgagggagcaattgagttcagtatcttcatttgagaggttcgaaatattccccaaagagagctcatggcccaaccacaccgtaaccggagtatcagcatcatgctcccataacgggaaaagcagtttttacagaaatttgctatggctgacgggaaagaatggtttgtacccaaacctgagcagatcctatgcaaacaacaaagagaaagaagtccttgtactgtggggtgttcatcacccgcctaacataggggaccaaagggccctctatcatacagaaaatgcttatgtctctgtagtgtcttcacattatagcagaagattcaccccagaaatagccaaaagacccaaggtgagagatcaggaaggaagaatcaattactactggactctactggaacccggggatacaataatatttgaggcaaatgggaatctaatagcgccaaggtttgctttcgcactgagtagaggctttggatcaggaatcatcacctcaaatgcaccaatggatgaatgtgatgcgaagtgtcaaacacctcagggagctataaacagcagtcttccttttcagaatgtacacccagtcacaataggagagtgtccaaagtatgtcaggagtgcaaaattaagaatggttacaggactaaggaacatcccatccattcaatccagaggtttgtttggagccattgccggtttcattgaagggggatggactggaatggtagatggttggtatggttatcaccaccagaatgagcaaggatctgggtatgctgcagatcaaaaaagcacacaaaatgccattaacgggattacaaacaaggtgaattctgtgattgagaaaatgaacactcaattcacagctgtgggcaaagaattcaacaaattggaaagaagaatggaaaacttaaataaaaaagttgatgatgggtttctagacatttggacgtataacgcagaattgttggttctactggaaaatgaaaggactttggacttccatgactccaacgtgaagaatctgtatgagaaagtaaaaagccaattaaagaataatgccaaagaaataggaaacgggtgttttgaattctatcacaagtgtgacgatgaatgcatggagagtgtgaaaaatggaacttatgactatccaaaatattccgaagaatcaaagttaaacagggagaaaattgatggagtgaaattggaatcaatgggagtctatcagattctggcgatctactcaacagtcgccagttccctggttcttttggtctccctgggggcaatcagcttctggatgtgttccaatgggtctttgcagtgtagaatatgcatctaa

SEQ ID NO: 32600 - RNA, 1698 nt, synthetic construct; identical to SEQ ID NO: 32592
  misc_feature 1..1698: note = hemagglutinin__InfluenzaA__ABW71371
  source 1..1698: mol_type = other RNA

SEQ ID NO: 32601 - RNA, 1698 nt, synthetic construct
  misc_feature 1..1698: note = hemagglutinin__InfluenzaA__ABW71382
  source 1..1698: mol_type = other RNA
atgaaagtaaaactactgattctgttatgtacatttacagctacatatgcagacacaatatgtataggctaccatgccaacaactcgaccgacactgttgacacagtacttgagaagaatgtgacagtgacacactctgtcaacctacttgaggacagtcacaatggaaaactatgtctactaaaaggaatagccccactacaattgggtaattgcagcgttgccggatggatcttaggaaacccagaatgcgaattgctgatttccaaggaatcatggtcctacattgtagagacaccaaatcctgagaatggaacatgttacccagggtatttcgccgactatgaggagctgagagagcaattgagttcagtatcttcatttgagaggttcgaaatattccccaaagagagctcatggtccaaccacaccataaccggagtatcagcatcatgctcccataacgggaaaagcagtttttacagaaatttgctatggctgacggggaagaatggtttgtatccaaacctgagcaagtcctatgcaaacaacaaagagaaagaagtccttgtactgtggggtgttcatcacccgcctaacataggggaccaaagggccctctatcatacagaaaatgcttatgtctctgtagtgtcttcacattatagcagaagattcaccccagaaatagccaaaagacccaaggtgagagatcaggaaggaagaatcaactactactggactctgcttgaacccggggatacaataatatttgaggcaaatggaaatctaatagcgccaaggtttgctttcgcactgagtagaggctttggatcaggaatcatcacctcaaatgcaccaatggatgaatgtgatgcgaaatgtcaaacacctcagggagctataaacagcagtcttcctttccagaatgtacacccagtcacaataggagagtgtccaaagtatgtcaggagtacaaaattaagaatggttacaggactaaggaacatcccatccattcaatccagaggtttatttggagccattgccggtttcattgaaggggggtggactggaatggtagatggttggtatggttatcaccatcagaatgagcaaggatctgggtatgctgcagatcaaaaaagcacacaaaatgccattaacgggattacaaacaaggtgaattctgtaattgagaaaatgaacactcaattcacagctgtgggcaaagaattcaacaaattggaaagaaggatggaaaacttaaataaaaaagttgatgatgggtttctagacatttggacatataacgcagaattgttggttctactggaaaatgaaaggactttggacttccatgactccaacgtgaagaatctgtatgagaaagtaaaaagccaattaaagaataatgccaaagaaataggaaacgggtgttttgaattctatcacaagtgtaacgatgaatgcatggagagtgtgaaaaatggaacttatgactatccaaaatattccgaagaatcaaagttgaacagggagaaaattgatggagtgaaattggaatcaatgggagtctatcagattttggcgatctactcaacagtcgccagttccctggttcttttggtctccctgggggcaatcagcttctggatgtgttccaatgggtctttgcagtgtagaatatgcatctaa

SEQ ID NO: 32602 - RNA, 1698 nt, synthetic construct
  misc_feature 1..1698: note = hemagglutinin__InfluenzaA__ABW71393
  source 1..1698: mol_type = other RNA
atgaaagtaaaactacttgttctgttatgtacatttacagctacatatgcagacacaatatgtataggctaccatgccaacaactcgaccgacactgttgacacagtacttgagaagaatgtgacagtgacacactctgtcaacctacttgaggacagtcacaatggaaaactatgtctactaaaaggaatagccccactacaattgggtaattgcagcgttgccggatggatcttaggaaacccagaatgcgaattactgatttccaaggaatcatggtcctacattgtagaaacaccaaatcctgagaatggaacatgttacccaggatatttcaccgactatgaggagctgagggagcaattgagttcagtatcttcatttgagaggttcgaaatattccccaaagagagctcatggcccaaccacaccgtaaccggagtatcagcatcatgctcccataacgggaaaagcagtttttacagaaatttgctatggctgacggggaagaatggtttgtatccaaacctgagcaagtcctatgcaaacaacaaagagaaagaagtccttgtactgtggggtgttcatcacccgcctaacataggggaccaaagggccctctatcatacagaaaatgcttatgtctctgtagtgtcttcacattatagcagaagattcaccccagaaatagccaaaagacccaaggtgagagatcaggaaggaagaatcaactactactggactctgctggaacccggggatacaataatatttgaggcaaatggaaatctaatagcgccaaggtttgctttcgcactgagtagaggctttggatcaggaatcatcacctcaaatgcaccaatgggtgaatgtgatgcgaagtgtcaaacacctcagggagctataaacagtagtcttcctttccagaatgtacatccagtcacaataggagagtgtccaaagtatgtcaggagtgcaaaattaagaatggttacaggactaaggaacatcccatccattcaatccagaggtttgtttggagccattgccggtttcattgaaggggggtggactggaatggtagatggttggtatggttatcaccatcagaatgagcaaggatctgggtatgctgcagatcaaaaaagcacacaaaatgccattaacgggattacaaacaaggtgaattctgtaattgagaaaatgaacactcaattcacagctgtgggcaaagaattcaacaaattggaaagaaggatggaaaacttaaataaaaaggttgatgatgggtttctagacatttggacatataacgcagaattgttggttctactggaaaatgaaaggactttggacttccatgactccaacgtgaagaatctgtatgagaaagtaaaaagccaattaaagaataatgccaaagaaataggaaacgggtgttttgaattctatcacaagtgtaacgatgaatgcatggagagtgtgaaaaatggaacttatgactatccaaaatattccgaagaatcaaagttgaacagggagaaaattgatggagtgaaattggaatcaatgggagtctatcagattctggcgatctactcaacagtcgccagttccctggttcttttggtctccctgggggcaatcagcttctggatgtgttccaatgggtctttgcagtgtagaatatgcatctaa

SEQ ID NO: 32603 - RNA, 1698 nt, synthetic construct
  misc_feature 1..1698: note = hemagglutinin__InfluenzaA__ABW71404
  source 1..1698: mol_type = other RNA
atgaaagtaaaactacttgttctgttatgtacatttacagctacatatgcagacacaatatgtataggctaccatgccaacaactcgaccgacactgttgacacagtacttgagaagaatgtgacagtgacacactctgtcaacctacttgaggacagtcacaatggaaaactatgtctactaaaaggaatagccccactacaattgggtaattgcagcgttgccggatggatcttaggaaacccagaatgcgaattactgatttccaaggaatcatggtcctacattgtagaaacaccaaatcctgagaatggaacatgttacccaggatatttcgccgactatgaggagctgagggagcaattgagttcagtatcttcatttgagaggttcgaaatattccccaaagagagctcatggcccaaccacaccgtaaccggagtatcagcatcatgctcccataacgggaaaagcagtttttacagaaatttgctatggctgacggggaagaatggtttgtatccaaacctgagcaagtcctatgcaaacaacaaagagaaagaagtccttgtaatgtggggtgttcatcacccgcctaacataggggaccaaagggccctctatcatacagaaaatgcttatgtctctgtagtgtcttcacattatagcagaagattcaccccagaaatagccaaaagacccaaggtgagagatcaggaaggaagaatcaactactactggactctgctggaacccggggatacaataatatttgaggcaaatggaaatctaatagcgccaaggtttgctttcgcactgagtagaggctttggatcaggaatcatcacctcaaatgcaccaatgggtgaatgtgatgcgaagtgtcaaacacctcagggagctataaacagtagtcttcctttccagaatgtacacccagtcacaataggagagtgtccaaagtatgtcaggagtgcaaaattaagaatggttacaggactaaggaacatcccatccattcaatccagaggtttgtttggagccattgccggtttcattgaaggggggtggactggaatggtagatggttggtatggttatcaccatcagaatgagcaaggatctgggtatgctgcagatcaaaaaagcacacaaaatgccattaacgggattacaaacaaggtgaattctgtaattgagaaaatgaacactcaattcacagctgtgggcaaagaattcaacaaattggaaagaaggatggaaaacttaaataaaaaagttgatgatgggtttctagacatttggacatataacgcagaattgttggttctactggaaaatgaaaggactttggacttccatgactccaacgtgaagaatctgtatgagaaagtaaaaagccaattaaagaataatgccaaagaaataggaaacgggtgttttgaattctatcacaagtgtaacgatgaatgcatggagagtgtgaaaaatggaacttatgactatccaaaatattccgaagaatcaaagttgaacagggagaaaattgatggagtgaaattggaatcaatgggagtctatcagattctggcgatctactcaacagtcgccagttccctggttcttttggtctccctgggggcaatcagcttctggatgtgttccaatgggtctttgcagtgtagaatatgcatctaa

SEQ ID NO: 32604 - RNA, 1698 nt, synthetic construct
  misc_feature 1..1698: note = hemagglutinin__InfluenzaA__ABW71415
  source 1..1698: mol_type = other RNA
atgaaagtaaaactacttgttctgttatgtacatttacagctacatatgcagacacaatatgtataggctaccatgccaacaactcgaccgacactgttgacacagtacttgagaagaatgtgacagtgacacactctgtcaacctacttgaggacagtcacaatggaaaactatgtctactaaaaggaatagccccactacaattgggtaattgcagcgttgccggatggatcttaggaaacccagaatgcgaattactgatttccaaggaatcatggtcctacattgtagaaacaccaaatcctgagaatggaacatgttacccaggatatttcgccgactatgaggagctgagggagcaattgagttcagtatcttcatttgagaggttcgaaatattccccaaagagagctcatggcccaaccacaccgtaaccggagtatcagcatcatgctcccatagtgggaaaagcagtttttacagaaatttgctatggctgacggggaagaatggtttgtatccaaacctgagcaagtcctatgcaaacaacaaagagaaagaagtccttgtactgtggggtgttcatcacccgcctaacataggggaccaaagggccctctatcatacagaaaatgcttatgtctctgtagtgtcttcacattatagcagaagattcaccccagaaatagccaaaagacccaaggtgagagatcaggaaggaagaatcaactactactggactctgctggaacccggggatacaataatatttgaggcaaatggaaatctaatagcgccaaggtttgctttcgcactgagtagaggctttggatcaggaatcatcacctcaaatgcaccaatgggtgaatgtgatgcgaagtgtcaaacacctcagggagctataaacagtagtcttcctttccagaatgtacatccagtcacaataggggagtgtccaaagtatgtcaggagtgcaaaattaagaatggttacaggactaaggaacatcccatccattcaatcccgaggtttgtttggagccattgccggtttcattgaaggggggtggactggaatggtagatggttggtatggttatcaccatcagaatgagcaaggatctgggtatgctgcagatcaaaaaagcacacaaaatgccattaacgggattacaaacaaggtgaattctgtaattgagaaaatgaacactcaattcacagctgtgggcaaagaattcaacaaattggaaagaaggatggaaaacttaaataaaaaggttgatgatgggtttctagacatttggacatataacgcagaattgttggttctactggaaaatgaaaggactttggacttccatgactccaacgtgaagaatctgtatgagaaagtaaaaagccaattaaagaataatgccaaagaaataggaaacgggtgttttgaattctatcacaagtgtaacgatgaatgcatggagagtgtgaaaaatggaacttatgactatccaaaatattccgaagaatcaaagttgaacagggagaaaattgatggagtgaaattggaatcaatgggagtctatcagattctggcgatctactcaacagtcgccagttccctggttcttttggtctccctgggggcaatcagcttctggatgtgttccaatgggtctttgcagtgtagaatatgcatctaa

SEQ ID NO: 32605 - RNA, 1698 nt, synthetic construct
  misc_feature 1..1698: note = hemagglutinin__InfluenzaA__ABW71426
  source 1..1698: mol_type = other RNA
atgaaagcaaaactactgattctgttatgtacatttacagctacatatgcagacacaatatgtataggttaccatgccaacaactcgaccgacactgttgacacagtacttgagaagaatgtgacagtgacacactctgtcaacctacttgaggacagtcacaatggaaaactatgtctactaaaaggaatagccccactacaattgggtaattgcagcgttgccggatggatcttaggaaacccagaatgcgaattactgatttccaaggaatcatggtcctacattgtagagacaccaaatcctgagaatggaacatgttacccagggtatttcgccgactatgaggagctgagagagcaattgagttcagtatcttcatttgagaggttcgaaatattccccaaagagagctcatggcccaaccacaccgtaaccggagtatcagcatcatgctcccataacgggaaaagcagtttttacagaaatttgctatggctgacggggaagaatggtttgtatccaaacctgagcaagtcctatgcaaacaacaaagagaaagaagtccttgtactgtggggtgttcatcacccgcctaacataggggaccaaagggccctctatcatacagaaaatgcttatgtctctgtagtgtcttcacattatagcagaagattcaccccagaaatagccaaaagacccaaggtgagagatcaggaaggaagaatcaactactactggactctgcttgaacccggggatacaataatatttgaggcaaatggaaatctaatagcgccaaggtttgctttcgcactgagtagaggctttggatcaggaatcatcacctcaaatgcaccaatggatgaatgtgatgcgaaatgtcaaacacctcagggagctataaacagcagtcttcctttccagaatgtacacccagtcacaataggagagtgtccaaagtatgtcaggagtacaaaattaagaatggttacaggactaaggaacatcccatccattcaatccagaggtttatttggagccattgccggtttcattgaaggggggtggactggaatggtagatggttggtatggttatcaccatcagaatgagcaaggatctgggtatgctgcagatcaaaaaagcacacaaaatgccattaacgggattacaaacaaggtgaattctgtaattgagaaaatgaacactcaattcacagctgtgggcaaagaattcaacaaattggaaagaaggatggaaaacttaaataaaaaagttgatgatgggtttctagacatttggacatataacgcagaattgttggttctactagaaaatgaaaggactttggacttccatgactccaacgtgaagaatctgtatgagaaagtaaaaagccaattaaagaataatgccaaagaaataggaaacgggtgttttgaattctatcacaagtgtaacgatgaatgcatggagagtgtgaaaaatggaacttatgactatccaaaatattccgaagaatcaaagttgaacagggagaaaattgatggagtgaaattggaatcaatgggagtctatcagattttggcgatctactcaacagtcgccagttccctggttcttttggtctccctgggggcaatcagcttctggatgtgttccaatgggtctttgcagtgtagaatatgcatctaa

SEQ ID NO: 32606 - RNA, 1698 nt, synthetic construct
  misc_feature 1..1698: note = hemagglutinin__InfluenzaA__ABW71448
  source 1..1698: mol_type = other RNA
atgaaagtaaaactactggttctgttatgtacatttacagctacatatgcagacacaatatgtataggctaccatgccaacaactcgaccgacactgttgacacagtacttgagaagaatgtgacagtgacacactctgtcaacctacttgaggacagtcacaatggaaaactatgtctactaaaaggaatagccccactacaattgggtaattgcagcgttgccggatggatcttaggaaacccagaatgcgaattactgatttccaaggaatcatggtcctacattgtagagacaccaaatcctgagaatggaacatgttacccagggtatttcgccgactatgaggagctgagagagcaattgagttcagtatcttcatttgagaggttcgaaatattccccaaagagagctcatggcccaaccacaccgtaaccggagtatcagcatcatgctcccataacgggaaaagcagtttttacagaaatttgctatggctgacggggaagaatggtttgtatccaaacctgagcaagtcctatgcaaacaacaaagagaaagaagtccttgtactgtggggtgttcatcacccgcctaacataggggaccaaagggccctctatcatacagaaaatgcttatgtctctgtagtgtcttcacattatagcagaagattcaccccagaaatagccaaaagacccaaggtgagagatcaggaaggaagaatcaactactactggactctgcttgaacccggggatacaataatatttgaggcaaatggaaatctaatagcgccaaggtttgctttcgcactgagtagaggctttggatcaggaatcatcacctcaaatgcaccaatggatgaatgtgatgcgaaatgtcaaacacctcagggagctataaacagcagtcttcctttccagaatgtacacccagtcacaataggagagtgtccaaagtatgtcaggagtacaaaattaagaatggttacaggactaaggaacatcccatccattcaatccagaggtttgtttggagccattgccggtttcattgaaggggggtggactggaatggtagatggttggtatggttatcaccatcagaatgagcaaggatctgggtatgctgctgatcaaaaaagcacacaaaatgccattaacgggattacaaacaaggtgaattctgtaattgagaaaatgaacactcaattcacagctgtgggcaaagaattcaacaaattggaaagaaggatggaaaacttaaataaaaaagttgatgatgggtttctagacatttggacatataacgcagaattgttggttctactggaaaatgaaaggactttggacttccatgactccaacgtgaagaatctgtatgagaaagtaaaaagccaattaaagaataatgccaaagaaataggaaacgggtgttttgaattctatcacaagtgtaacgatgaatgcatggagagtgtgaaaaatggaacttatgactatccaaaatattccgaagaatcaaagttgaacagggagaaaattgatggagtgaaattggaatcaatgggagtctatcagattttggcgatctactcaacaatcgccagttccctggttcttttggtctccctgggggcaatcagcttctggatgtgttccaatgggtctttgcagtgtagaatatgcatctaa

SEQ ID NO: 32607 - RNA, 1698 nt, synthetic construct; identical to SEQ ID NO: 32571
  misc_feature 1..1698: note = hemagglutinin__InfluenzaA__ABW71459
  source 1..1698: mol_type = other RNA

SEQ ID NO: 32608 - RNA, 1698 nt, synthetic construct
  misc_feature 1..1698: note = hemagglutinin__InfluenzaA__ABW71470
  source 1..1698: mol_type = other RNA
atgaaagtaaaactactggttctgttatgtacatttacagctacatatgcagacacaatatgtataggctaccatgccaacaactcgaccgacactgttgacacagtacttgagaagaatgtgacagtgacacactctgtcaacctacttgaggacagtcacaatggaaaactatgtctactaaaaggaatagccccactacaattgggtaattgcagcgttgccggatggatcttaggaaacccagaatgcgaattactgatttccaaggaatcatggtcctacattgtagagacaccaaatcctgagaatggaacatgttacccagggtatttcgccgactatgaggagctgagagagcaattgagttcagtatcttcatttgagaggttcgaaatattccccaaagagagctcatggcccaaccacaccgtaaccggagtatcagcatcatgctcccataacgggaaaagcagtttttacagaaatttgctatggctgacggggaagaatggtttgtatccaaacctgagcaagtcctatgcaaacaacaaagagaaagaagtccttgtactgtggggtgttcatcatccgcctaacataggggaccaaagggccctctatcatacagaaaatgcttatgtctctgtagtgtcttcacattatagcagaagattcaccccagaaatagccaaaagacccaaggtgagagatcaggaaggaagaatcaactactactggactctgcttgaacccggggatacaataatatttgaggcaaatggaaatctaatagcgccaaggtttgctttcgcactgagtagaggctttggatcaggaatcatcacctcaaatgcaccaatggatgaatgtgatgcgaaatgtcaaacacctcagggagctataaacagcagtcttcctttccagaatgtacacccagtcacaataggagagtgtccaaagtatgtcaggagtacaaaattaagaatggttacaggactaaggaacatcccatccattcaatccagaggtttgtttggagccattgccggtttcattgaaggggggtggactggaatggtagatggatggtatggttaccaccatcagaatgagcaaggatctgggtatgctgctgatcaaaaaagcacacaaaatgccattaacgggattacaaacaaggtgaattctgtaattgagaaaatgaacactcaattcacagctgtgggcaaagaattcaacaaattggaaagaaggatggaaaacttaaataaaaaagttgatgatgggtttctagacatttggacatataacgcagaattgttggttctactggaaaatgaaaggactttggacttccatgactccaacgtgaagaatctgtatgagaaagtaaaaagccaattaaagaataatgccaaagaaataggaaacgggtgttttgaattctatcacaagtgtaacgatgaatgcatggagagtgtgaaaaatggaacttatgactatccaaaatattccgaagaatcaaagttgaacagggagaaaattgatggagtgaaattggaatcaatgggagtctatcagattttggcgatctactcaacagtcgccagttccctggttcttttggtctccctgggggcaatcagcttctggatgtgttccaatgggtctttgcagtgtagaatatgcatctaa

SEQ ID NO: 32609 - RNA, 1707 nt, synthetic construct
  misc_feature 1..1707: note = hemagglutinin__InfluenzaA__ABW74702
  source 1..1707: mol_type = other RNA
atggagaaaatagtgcttcttcttgcaatagtcagtcttgttaaaagtgatcagatttgcattggttaccatgcaaacaattcaacagagcaggttgacacaatcatggaaaagaacgttactgttacacatgcccaagacatattggaaaagacacacaacgggaagctctgcgatctagatggagtgaagcctctaattttaagagattgtagtgtagctggatggctcctcgggaacccaatgtgtgacgaattcatcaatgtaccggaatggtcttacatagtggagaaggccaatccaaccaatgacctctgttacccagggagtttcaacgactatgaagaactgaaacacctattgagcagaataaaccattttgagaaaattcagatcatccccaaaagttcttggtccgatcatgaagcctcatcaggagtgagttcagcatgtccatacctgggtagttcctccttttttagaaatgtggtatggcttatcaaaaagaacagtacatacccaacaataaagaaaagctacaataataccaaccaagaagatcttttggtactgtgggggattcaccatcctaatgatgcggcagagcagacaaggctatatcaaaacccaaccacctatatttccattgggacatcaacactaaaccagagattggtaccaaaaatagctactagatccaaagtaaatgggcaaagtggaaggatggagttcttctggacaattttaaaacctaatgatgcaatcaacttcgagagtaatggaaatttcattgctccagaatatgcatacaaaattgtcaagaaaggggactcagcaattatgaagagtgaattggaatatggtaactgcaacaccaagtgtcaaactccaatgggggcgataaactctagtatgccattccacaacatacaccctctcaccatcggggaatgccccaaatatgtgaaatcaaacagattagtccttgcaacagggctcagaaatagccctcaaagagaaagcagaagaaaaaagagaggactatttggagctatagcaggttttatagagggaggatggcagggaatggtagatggttggtatgggtaccaccatagcaatgagcaggggagtgggtacgctgcagacaaagaatccactcaaaaggcaatagatggagtcaccaataaggtcaactcaatcattgacaaaatgaacactcagtttgaggccgttggaagggaatttaacaacttagaaaggagaatagagaatttaaacaagaagatggaagacgggtttctagatgtctggacttataatgccgaacttctggttctcatggaaaatgagagaactctagactttcatgactcaaatgttaagaacctatacgacaaggtccgactacagcttagggataatgcaaaggagctgggcaacggttgtttcgagttctatcacaaatgtgataatgaatgtatagaaagtataagaaatggaacatataactacccgcagtattcagaagaagcaagattaaaaagagaggaaataagtggagtaaaattggaatcaataggaacttaccaaatactgtcaatttattcaacagtggcgagttccctagcactggcaatcatgatggctggtctatctttatggatgtgctccaatggatcgttacaatgcagaatttgcatttaa

SEQ ID NO: 32610 - RNA, 1707 nt, synthetic construct
  misc_feature 1..1707: note = hemagglutinin__InfluenzaA__ABW74703
  source 1..1707: mol_type = other RNA
atggagaaaatagtgcttcttcttgcaatagtcagtcttgttaaaagtgatcagatttgcattggttaccatgcaaacaattcaacagagcaggttgacacaatcatggaaaagaacgttactgttacacatgcccaagacatactggaaaagacacacaacgggaagctctgcgatctagatggagtgaagcctctaattttaaaagattgtagtgtagctggatggctcctcgggaacccaatgtgtgacgaattcatcaatgtaccggaatggtcttacatagtggagaaggccaatccaaccaatgacctctgttacccagggagtttcaacgactatgaagaactgaaacacctattgagcagaataaaccattttgagaaaattcaaatcatccccaaaagttcttggtccgatcatgaagcctcatcaggagtgagctcagcatgtccatacctgggaagtccctccttttttagaaatgtggtatggcttatcaaaaagaacagtacatacccaacaataaagaaaagctacaataataccaaccaagaagatcttttggtactgtggggaattcaccaccctaatgatgcggcagagcagacaaggctatatcaaaacccaaccacctatatttccattgggacatcaacactaaaccagagattggtaccaaaaatagctactagatccaaagtaaacgggcaaagtggaaggatggagttcttctggacaattttaaaacctaatgatgcagtcaacttcgagagtaatggaaatttcattgctccagaatatgcatacaaaattgtcaagaaaggggactcagcaattatgaaaagtgaattggaatatggtaactgtaacaccaagtgtcaaactccaatgggggcgataaactctagtatgccattccacaacatacaccctctcaccatcggggaatgccccaaatatgtgaaatcaaacagattagtccttgcaacagggctcagaaatagccctcaaagagagagcagaagaaaaaagagaggactatttggagctatagcaggttttatagagggaggatggcagggtatggtagatggttggtatgggtaccaccatagcaatgagcaggggagtgggtacgctgcagacaaagaatccactcaaaaggcaatagatggagtcaccaataaggtcaactcaatcattgacaaaatgaacactcagtttgaggccgttggaagggaatttaatagcttagaaaggagaatagagaatttaaacaagaagatggaagacgggtttctagatgtttggacttataatgccgaacttctggttctcatggaaaatgagagaactctagactttcatgactcaaatgttaagaacctctacgacaaggtccgactacagcttagggataatgcaaaggagctgggtaacggttgtttcgagttctatcacaaatgtgataatgaatgtatggaaagtataagaaacggaacgtacaactatccgcagtattcagaagaagcaagattaaaaagagaggaaataagtggggtaaaattggaatcaataggaacttaccaaatactgtcaatttattcaacagtggcgagttccctagcactggcaatcatgatagctggtctatctttatggatgtgctccaatggatcgttacagtgcagaatttgcatttaa

SEQ ID NO: 32611 - RNA, 1707 nt, synthetic construct
  misc_feature 1..1707: note = hemagglutinin__InfluenzaA__ABW74705
  source 1..1707: mol_type = other RNA
atggagaaaatagtgcttcttcttgcaatagtcagtcttgttaaaagtgatcagatttgcattggttaccatgcaaacaattcaacagagcaggttgacacaatcatggaaaagaacgttactgttacacatgcccaagacatactggaaaagacacacaacgggaagctctgcgatctagatggagtgaagcctctaattttaagagattgtagtgtagctggatggctcctcgggaacccaatgtgtgacgaattcatcaatgtaccggaatggtcttacatagtggagaaggccaatccaaccaatgacctctgttacccagggagtttcaacgactatgaagaactgaaacatctattgagcagaataaaccattttgagaaaattcaaatcatccccaaaagttcttggtccgatcatgaagcctcatcaggagtgagctcagcatgtccatacctgggaagtccctccttttttagaaatgtggtatggcttatcaaaaagaacagtacatacccaacaataaagaaaagctacaataataccaaccaagaagatcttttggtactgtggggaattcaccatcctaatgatgcggcagagcagacaaggctatatcaaaacccaaccacctatatttccattgggacatcaacactaaaccagagattggtaccaaaaatagctactagatccaaagtaaacgggcaaagtggaaggatggagttcttctggacaattttaaaacctaatgatgcaatcaacttcgaaagtaatggaaatttcattgctccagaatatgcatacaaaattgtcaagaaaggggactcagcaattatgaaaagtgaattggaatatggtaactgcaacaccaagtgtcaaactccaatgggggcgataaactctagtatgccattccacaacatacaccctctcaccatcggggaatgccccaaatatgtgaaatcaaacagattagtccttgcaacagggctcagaaatagccctcaaagagagagcagaagaaaaaagagaggactatttggagctatagcaggttttatagagggaggatggcagggaatggtagatggttggtatgggtaccaccatagcaatgagcaggggagtgggtacgctgcagacaaagaatccactcaaaaggcaatagatggagtcaccaataaggtcaactcaattattgacaaaatgaacactcagtttgaggctgttggaagggaatttaataacttagaaaggagaatagagaatttaaacaagaagatggaagacgggtttctagatgtttggacttataatgccgaacttctggttctcatggaaaatgagagaactctagactttcatgactcaaatgttaagaacctctacgacaaggtccgactacagcttagggataatgcaaaggagctgggtaacggttgtttcgagttctatcacaaatgtgataatgaatgtatggaaagtataagaaacggaacgtacaactatccgcagtattcagaagaagcaagattgaaaagagaggaaataagtggggtaaaattggaatcaataggaacttaccaaatactgtcaatttattcaacagtggcgagttccctagcactggcaatcatgatagctggtctatctttatggatgtgctccaatggatcgttacaatgcagaatttgcatttaa

SEQ ID NO: 32612 - RNA, 1707 nt, synthetic construct
  misc_feature 1..1707: note = hemagglutinin__InfluenzaA__ABW74707
  source 1..1707: mol_type = other RNA
atggagaaaatagtgcttcttcttgcaatagtcagtcttgttaaaagtgatcagatttgcattggttaccatgcaaacaattcaacagagcaggttgacacaatcatggaaaagaacgttactgttacacatgcccaagacatactggaaaagacacacaacgggaagctctgcgatctagatggagtgaagcctctaattttaagagattgtagtgtagctggatggctcctcgggaacccaatgtgtgacgaattcatcaatgtaccggaatggtcttacatagtggagaaggccaatccaaccaatgacctctgttacccagggagtttcaacgactatgaagaactgaaacacctattgagcagaataaaccattttgagaaaattcaaatcatccccaaaagttcttggtccgatcatgaagcctcatcaggagtgagctcagcatgtccatacctgggaagtccctccttttttagaaatgtggtatggcttatcaaaaagaacagtacatacccaacaataaagaaaagctacaataataccaaccaagaagatcttttggtactgtggggaattcaccatcctaatgatgcggcagagcagacaaggctatatcaaaacccaaccacctatatttccattgggacatcaacactaaaccagagattggtaccaaaaatggctactagatccaaagtaaacgggcaaagtggaaggatggagttcttctggacaattttaaaacctaatgatgcaatcaacttcgagagtaatggaaatttcattgctccagaatatgcatacaaaattgtcaagaaaggggactcagcaattatgaaaagtgaattggaatatggtaactgcaacaccaagtgtcaaactccaatgggggcgataaactctagtatgccattccacaacatacaccctctcaccatcggggaatgccccaaatatgtgaaatcaaacagattagtccttgcaacagggctcagaaatagccctcaaagagagagcagaagaaaaaagagaggactatttggagctatagcaggttttatagagggaggatggcagggaatggtagatggttggtatgggtaccaccatagcaatgagcaggggagtgggtacgctgcagacaaagaatccactcaaaaggcaatagatggagtcaccaataaggtcaactcaattattgacaaaatgaacactcagtttgaggccgttggaagggaatttaataacttagaaaggagaatagagaatttaaacaagaagatggaagacgggtttctagatgtttggacttataatgccgaacttctggttctcatggaaaatgagagaactctagactttcatgactcaaatgttaagaacctctacgacaaggtccgactacagcttagggataatgcaaaggagctgggtaacggttgtttcgagttctatcacaaatgtgataatgaatgtatggaaagtataagaaacggaacgtacaactatccgcagtattcagaagaagcaagattaaaaagagaggaaataagtggggtaaaattggaatcaataggaacttaccaaatactgtcaatttattcaacagtggcgagttccctagcactggcaatcatgatagctggtctatctttatggatgtgctccaatggatcgttacaatgcagaatttgcatttaa

SEQ ID NO: 32613 - RNA, 1707 nt, synthetic construct
  misc_feature 1..1707: note = hemagglutinin__InfluenzaA__ABW74708
  source 1..1707: mol_type = other RNA
atggagaaaatagtgcttcttcttgcaatagtcagtcttgttaaaagtgatcagatttgcattggttaccatgcaaacaattcaacagagcaggttgacacaatcatggaaaagaacgttactgttacacatgcccaagacatactggaaaagacacacaatgggaagctctgcgatctagatggagtgaagcctctaattttaagagattgtagtgtagctggatggctcctcgggaacccaatgtgtgacgaattcatcaatgtaccggaatggtcttacatagtggagaaggccaatccaaccaatgacctctgttacccagggagtttcaacgactatgaagaactgaaacacctattgagcagaataaaccattttgagaaaattcaaatcatccccaaaagttcttggtccgaccatgaagcctcatcaggagtgagctcagcatgtccatacctgggaagtccctccttttttagaaatgtggtatggcttatcaaaaagaacagtacatacccaacaataaagaaaagctacaataataccaaccaagaagatcttttggtactgtggggaattcaccatcctaatgatgcggcagagcagacaaggctatatcaaaacccaaccacctatatttccattgggacatcaacactaaaccagagattggtaccaaaaatagctactagatccaaagtaaacgggcaaagtggaaggatggagttcttctggacaattttaaaacctaatgatgcaatcaacttcgagagtaatggaaatttcattgctccagaatatgcatacaaaattgtcaagaaaggggactcagcaattatgaaaagtgaattggaatatggtaactgcaacaccaagtgtcaaactccgatgggggcgataaactctagtatgccattccacaacatacaccctctcaccatcggggaatgccccaaatatgtgaaatcaaacagatcagtccttgcaacagggctcagaaatagccctcaaagagagagcagaagaaaaaagagaggactatttggagctatagcaggttttatagagggaggatggcagggaatggtagatggttggtatgggtaccaccatagcaatgagcaggggagtggatacgctgcagacaaagaatccactcaaaaggcaatagatggagtcaccaataaggtcaactcaatcattgacaaaatgaacactcagtttgaggccgttggaagggaatttaataacttagaaaggagaatagagaatttaaacaagaagatggaagacgggtttctagatgtttggacttataatgccgagcttctggttctcatggaaaatgagagaactctagactttcatgactcaaatgttaagaacctctacgacaaggtccgactacagcttagggataatgcaaaggagctgggtaacggttgtttcgagttctatcacaaatgtgataatgaatgtatggaaagtataagaaacggaacgtacaactatccgcagtattcagaagaagcaagattaaaaagagaggaaataagtggggtaaaattggaatcaataggaacttaccaaatactgtcaatttattcaacagtggcgagttccctagcactggcaatcatgatggctggtctatccttatggatgtgctccaatggatcgttacaatgcagaatttgcatttaa

SEQ ID NO: 32614 - RNA, 1707 nt, synthetic construct; identical to SEQ ID NO: 32611
  misc_feature 1..1707: note = hemagglutinin__InfluenzaA__ABW74710
  source 1..1707: mol_type = other RNA

SEQ ID NO: 32615 - RNA, 1707 nt, synthetic construct; identical to SEQ ID NO: 32611
  misc_feature 1..1707: note = hemagglutinin__InfluenzaA__ABW74711
  source 1..1707: mol_type = other RNA

SEQ ID NO: 32616 - RNA, 1707 nt, synthetic construct
  misc_feature 1..1707: note = hemagglutinin__InfluenzaA__ABW74712
  source 1..1707: mol_type = other RNA
atggagaaaatagtgcttcttctttcaatagtcagtcttgttaaaagtgatcagatttgcattggttaccatgcaaacaattcaacagagcaggttgacacaatcatggaaaagaacgttactgttacacatgcccaagacatactggaaaagacacacaacgggaagctctgcgatctagatggagtgaagcctctaattttaagagattgtagtgtagctggatggctcctcgggaacccaatgtgtgacgaattcatcaacgtaccggaatggtcttacatagtggaaaaggccaatccaaccaatgacctctgttacccagggagtttcaacgactatgaagaactgaaacacctattgagcagaataaaccattttgagaaaattcagatcatccccaaaagttcttggtccgatcatgaagcctcatcaggagtgagctcagcatgtccatacctgggaagtccctccttttttagaaatgtggtatggcttatcaaaaagaacagtacatacccaacaataaagaaaagctacaataataccaaccaagaagatcttttggtactgtggggaattcaccatcctaataatgaggaagagcagacaaggctatatcaaaacccaaccacctatatttccattgggacatcaacactaaaccagagattggtaccaaaaatagctactagatccaaagtaaacgggcaaagtgggaggatggagttcttctggacaattttaaaaccaaatgatgcaatcaacttcgagagcaatggaaatttcattgctccagaatatgcatacaaaattgtcaagaaaggggactcagcaattatgaaaagtgaattggaatatagtaactgcaacaccaagtgtcaaactccaatgggggcgataaactctagtatgccattccacaacatacaccctctcaccatcggggaatgccccaaatatgtgaaatcaagcagattagtccttgcaacagggctcagaaatagccctcaaagagagagcagaagaaaaaagagaggtctatttggagctatagcaggttttatagagggaggatggcagggaatggtagatggttggtatgggtaccaccatagcaatgagcaggggagtgggtacgctgcagacaaagaatctactcaaaaggcaatagatggagtcaccaataaggtcaactcaattattgacaaaatgaacactcagtttgaggccgttggaagggaatttaataacttagaaaggagaatagagaatttaaacaagaagatggaagacgggtttctagatgtttggacttataatgccgaacttctggtcctcatggaaaatgagagaactctagactttcatgactcaaatgttaagaacctctatgacaaggtccgactacagcttagggataatgcaaaggagctgggtaacggttgtttcgagttctatcacaaatgtgataatgaatgtatggaaagtataagaaacggaacgtacaactatccgcagtattcagaagaagcaagattaaaaagagaggaaataagtggggtaaagttggaatcaataggaacttaccaaatactgtcaatttactcaacagtggcgagttccctagcactggcaatcatgatagctggtctatctttatggatgtgctccaatggatcgttacaatgcagaatttgcatttaa

SEQ ID NO: 32617 - RNA, 1701 nt, synthetic construct
  misc_feature 1..1701: note = hemagglutinin__InfluenzaA__ABW80976
  source 1..1701: mol_type = other RNA
atgaagactatcattgctttgagctacattttatgcctggttttcgctcaaaaacttcccggaaatgacaacagcacggcaacgctgtgcctggggcaccatgcagtgccaaacggaacgctagtgaaaacaatcacgaatgaccaaattgaagtaactaatgctactgagctggttcagagttcttcaacaagtagaatatgcgacagtcctcaccaaatccttgatggagaaaattgcacactaatagatgctctattgggagaccctcattgtgatggcttccaaaataaggaatgggacctttttgttgaacgcagcaaagcctacagcaactgttacccttatgatgtgccggattatgtctcccttaggtcactagttgcctcatcaggcacgctggagtttaacaatgaaagcttcaattggactggagtcgctcagaatggaacaagctctgcttgcaaaaggagatctgataaaagtttctttagtagattgaattggttgcaccaattaaaatacaaatatccagcactgaacgtgactatgccaaacaatgaaaaatttgacaaattgtacatttggggggttcaccacccgggtacagacagtgaccaaatcagcatatatgctcaagcatcagggagagtcacagtctctaccaaaagaagccaacaaactgtaatcccgaatatcggatctagaccctgggtaaggggtgtctccagcggaataagcatctattggacaatagtaaaaccgggagacatacttttgattaacagcacagggaatctaattgctcctcggggttacttcaaaatacgaagtgggaaaagctcaataatgaggtcagatgcacccattggcaaatgcaattctgaatgcatcactccaaatggaagcattcccaatgacaaaccatttcaaaatgtaaacaggatcacatatggggcctgtcccagatatgttaagcaaaacactctgaaattggcaacagggatgcggaatgtaccagagaaacaaactagaggcatattcggtgcaatcgcgggcttcatagaaaatggttgggagggaatgatggacggttggtacggtttcaggcatcaaaattctgagggcacagggcaagcagcagatcttaaaagcactcaagcagcaatcaaccaaatcaacgggaaactgaataggttaatcgagaaaacgaacgagaaattccatcaaattgaaaaagaattctcagaagtagaagggagaattcaggacctcgagaaatatgttgaggacactaaaatagatctctggtcgtacaatgcggagcttcttgttgccctggagaaccaacatacaattgatctaactgactcagaaatgaacaaactgtttgaaagaacaaagaagcaactgagggaaaatgctgaggatatgggcaatggttgtttcaaaatataccacaaatgtgacaatgcctgcatagggtcaatcagaaatggaacttatgaccatgatgtatacagagacgaagcattgaacaaccggttccagatcaaaggtgttgagctgaagtcaggatacaaagattggatcctatggatttcctttgccatatcatgttttttgctttgtattgttttgctggggttcatcatgtgggcctgccaaaaaggcaacattaggtgcaacatttgcatttga

SEQ ID NO: 32618 - RNA, 1701 nt, synthetic construct
  misc_feature 1..1701: note = hemagglutinin__InfluenzaA__ABW80977
  source 1..1701: mol_type = other RNA
atgaagactatcattgctttgagctacattctatgtctggttttcgctcaaaaacttcccggaaatgacaacagcacggcaacgctgtgccttgggcaccatgcagtaccaaacggaacgatagtgaaaacaatcacgaatgaccaaattgaagttactaatgctactgagctggttcagagttcctcaacaggtggaatatgcgacagtcctcatcagatccttgatggagaaaactgcacactaatagatgctctattgggagaccctcagtgtgatggcttccaaaataagaaatgggacctttttgttgaacgcagcaaagcctacagcaactgttacccttatgatgtgccggattatgcctcccttaggtcactagttgcctcatccggcacactggagtttaacaatgaaagcttcaattggactggagtcactcaaaatggaacaagctctgcttgcaaaaggagatctaataaaagtttctttagtagattgaattggttgacccacttaaaattcaaatacccagcattgaacgtgactatgccaaacaatgaaaaatttgacaaattgtacatttggggggttcaccacccgggtacggacaatgaccaaatcaacctatatgctcaagcatcaggaagaatcacagtctctaccaaaagaagccaacaaactgtaatcccgaatatcggatctagacccagagtaagggatgtccccagcagaataagcatctattggacaatagtaaaaccgggagacatacttttgattagcagcacagggaatctaattgctcctcggggttacttcaaaatacgaagtgggaaaagctcaataatgagatcagatgcacccattggcaaatgcaattctgaatgcatcactccaaatggaagcattcccaatgacaaaccatttcaaaatgtaaacaggatcacatatggggcctgtcccagatatgttaagcaaaacactctgaaattggcaacagggatgcgaaatgtaccagagaaacaaactagaggcatatttggcgcaatcgcgggtttcatagaaaatggttgggagggaatggtggacggttggtacggtttcaggcatcaaaattctgagggaacaggacaagcagcagatctcaaaagcactcaagcagcaatcaaccaaatcaatgggaagctgaataggttgatcgggaaaacaaacgagaaattccatcagattgaaaaagaattctcagaagtagaagggagaattcaggacctcgagaaatatgttgaggacactaaaatagatctctggtcatacaacgcggagcttcttgttgccctggagaaccaacatacaattgatctaactgactcagaaatgaacaaactgtttgaaagaacaaagaagcaactgagggaaaatgctgaggatatgggcaatggttgtttcaaaatataccacaaatgtgacaatgcctgcatagggtcaatcagaaatggaacttatgaccatgatgtatacagagatgaagcattaaacaaccggttccagatcaaaggtgttgagctgaagtcaggatacaaagattggatcctatggatttcctttgccatatcatgttttttgctttgtgttgctttgttggggttcatcatgtgggcctgccaaaaaggcaacattaggtgcaacatttgcatttga

SEQ ID NO: 32619 - RNA, 1698 nt, synthetic construct
  misc_feature 1..1698: note = hemagglutinin__InfluenzaA__ABW80979
  source 1..1698: mol_type = other RNA
atgaaagcaaaactactggtcctgttatgtacatttacagctacatatgcagacacaatatgtataggctaccatgccaacaactcaaccgacactgttgacacagtacttgagaagaatgtgacagtgacacactctgtcaacctacttgaggacagtcacaatggaaaactatgtctactaaaaggaatagccccactacaattgggtaattgcagcgttgccggatggatcttaggaaacccagaatgcgaattactgatttccaaggaatcatggtcctacattgtagaaacaccaaatcctgagaatggaacatgttacccagggtatttcgccgactatgaggaactgagggagcaattgagttcagtatcttcatttgagagattcgaaatattccccaaagaaagctcatggcccaaccacaccgtaaccggagtatcagcatcatgctcccataatgggaaaagcagtttttacagaaatttgctatggctgacggggaagaatggtttgtacccaaacctgagcaagtcctatgtaaacaacaaagagaaagaagtccttgtactatggggtgttcatcacccgcctaacatagggaaccaaagggccctctatcatacagaaaatgcttatgtctctgtagtgtcttcacattatagcagaagattcaccccagaaatagccaaaagacccaaagtaagagatcaggaaggaagaatcaactactactggactctgctggaacctggggatacaataatatttgaggcaaatggaaatctaatagcgccatggtatgcttttgcactgagtagaggctttggatcaggaatcatcacctcaaatgcaccaatggatgaatgtgatgcgaagtgtcaaacacctcagggagctataaacagcagtcttcctttccagaatgtacacccagtcacaataggagagtgtccaaagtatgtcaggagtgcaaaattaaggatggttacaggactaaggaacatcccatccattcaatccagaggtttgtttggagccattgccggtttcattgaaggggggtggactggaatggtagatgggtggtatggttatcatcatcagaatgagcaaggatctggctatgctgcagatcaaaaaagtacacaaaatgccattaacgggattacaaacaaggtgaattctgtaattgagaaaatgaacactcaattcacagctgtgggcaaagaattcaacaaattggaaagaaggatggaaaacttaaataaaaaagttgatgatgggtttctagacatttggacatataatgcagaattgttggttctactggaaaatgaaaggactttggatttccatgactccaatgtgaagaatctgtatgagaaagtaaaaagccaattaaagaataatgccaaagaaataggaaacgggtgttttgaattctatcacaagtgtaacaatgaatgcatggagagtgtgaaaaatggaacttatgactatccaaaatattccgaagaatcaaagttaaacagggagaaaattgatggagtgaaattggaatcaatgggagtctatcagattctggcgatctactcaactgtcgccagttccctggttcttttggtctccctgggggcaatcagcttctggatgtgttccaatgggtctttgcagtgtagaatatgcatctga

SEQ ID NO: 32620 - RNA, 1701 nt, synthetic construct
  misc_feature 1..1701: note = hemagglutinin__InfluenzaA__ABW81505
  source 1..1701: mol_type = other RNA
atgaaagcaaaactactagttctgttgtgtacatttacagctacatatgcagacacaatatgtataggctaccatgcgaacaactcaactgacactgttgacacagtacttgagaagaacgtgacagtgacacactctgtcaacctacttgaggacagtcacaatggaaaactatgccgactaaaaggaacagccccactacaattgggtaattgcagcattgccggatggatcttaggaaatccagaatgcgaatcactgttttctaaggaatcatggtcttacattgcagaaacaccaaaccctaaaaatggaacatgttacccagggtatttcgccgactatgaggaactgagggagcaattgagctcagtatcatcattcgagagatttgaaatattccccaaggatagctcatggcccaaccacactgtaaccaaaggagtgacggcatcatgctcccataatgggaaaagcagcttttacaaaaatttgctatggctgacggagaagaatggcttgtacccaaatctgagcaagtcctatgtaaacaaaaagggaaaagaagtccttgtgctatggggtgttcatcacccgtctaacatgggggaccaacgggccatctatcataaagaaaatgcttatgtttctgtgttgtcttcacattatagcagaagattcaccccagaaatagcaaaaagaccaaaagtaagagatcaagaagggagaattaactactactggactctgctggaacccggggacacaataatatttgaggcaaatggaaatctaatagcgccgtggtacgctttcgcactgagtagaggctttgggtcaggaatcatcatctcaaatgcatcaatgggtgaatgtgacgctaagtgtcaaacaccccaaggagctataaacagtagtctccccttccagaatgtacacccagtcacaataggagagtgtccaaagtatgtcaggagtacaaaattaaggatggttacaggactaaggaacgtcccatccattcaatccagaggtttgtttggagccattgccggtttcattgaaggagggtggactggaatgatagatggatggtatggttatcatcatcaaaatgaacaaggatctggctatgctgcggaccaaaaaagcacacaaaatgccattaatgggattacaaacaaggtgaattctataatcgagaaaatgaacactcaattcacagctgtaggcaaagaattcaacaaattagaaagaaggatggaaaacttaaataagaaagttgatgatggatttctggacatttggacatataatgcagaattgttagttctcctggaaaatgaaagaactttggattttcatgactcaaatgtgaagaacctgtatgagaaagtgaaaacccaattgaagaataatgccaaagaaatagggaacgggtgttttgaattctatcacaagtgtaacaatgaatgcatggaaagtgtgaaaaatggaacttatgactatccaaaatattccaaagaatcaaagttaaacagggaaaaaattgatggagtgaaattggaatcaatgggagtctatcagattctggcgatctactcaactgtcgccagttcgctggtgcttttggtctccctgggggcaatcagcttctggatgtgttctaatgggtctctgcagtgtagaatatgcatctga

SEQ ID NO: 32621 - RNA, 1698 nt, synthetic construct
  misc_feature 1..1698: note = hemagglutinin__InfluenzaA__ABW81506
  source 1..1698: mol_type = other RNA
atgaaagtaaaactactggtcctgttatgtacatttacagctacatatgcagacacaatatgtataggctaccatgccaacaactcaaccgacactgttgacacagtacttgagaagaatgtgacagtgacacactctgtcaacctacttgaggacagtcacaatggaaaactatgtctactaaaaggaatagccccactacaattgggtaattgcagcgttgccggatggatcttaggaaacccagaatgcgaattactgatttccaaggaatcatggtcctacattgtagaaacaccaaatcctgagaatggaacatgttacccagggtatttcgccgactatgaggaactgagggagcaattgagttcagtatcttcatttgagagattcgaaatattccccaaagaaagctcttggcccaaccacaccgtaaccggagtatcagcatcatgctcccataatgggaaaagcagtttttacagaaatttgctatggctgacggggaagaatggtttgtacccaaacctgagcaagtcctatgcaaacaacaaagagaaagaagtccttgtactatggggtgttcatcacccgcctaacatagggaaccaaagggccctctatcatacagaaaatgcttatgtctctgtagtgtcttcacattatagcagaagattcaccccagaaatagccaaaagacccaaagtaagagatcaggaaggaagaatcaactactactggactctgctggaacccggggatacaataatatttgaggcaaatggaaatctaatagcgccatggtatgctttcgcactgagtagaggctttggatcaggaatcatcacctcaaatgcaccaatggatgaatgtgatgcgaagtgtcaaacacctcagggagctataaacagcagtcttcctttccagaatgtacacccagtcacaataggagagtgtccaaagtatgtcaggagtgcaaaattaaggatggttacaggactaaggaacatcccatccattcaatccagaggtttgtttggagccattgccggtttcattgaaggggggtggactggaatggtagatgggtggtatggttatcatcatcagaatgagcaaggatctggctatgctgcagatcaaaaaagcacacaaaatgccattaacgggattacaaacaaggtgaattctgtaattgagaaaatgaacactcaattcacagctgtgggcaaagaattcaacaaattggaaagaaggatggaaaacttaaataaaaaagttgatgatgggtttctagacatttggacatataatgcagaattgttggttctactggaaaatgaaaggactttggatttccatgactccaatgtgaagaatctgtatgagaaagtaaaaagccaattaaagaataatgccaaagaaataggaaacgggtgttttgaattctatcacaagtgtaacaatgaatgcatggagagtgtgaaaaatggaacttatgactatccaaaatattccgaagaatcaaagttaaacagggagaaaattgatggagtgaaattggaatcaatgggaatctatcagattctggcgatctactcaactgtcgccagttccctggttcttttggtctccctgggggcaatcagcttctggatgtgttccaatgggtctttgcagtgtagaatatgcatctga

SEQ ID NO: 32622 - RNA, 1701 nt, synthetic construct
  misc_feature 1..1701: note = hemagglutinin__InfluenzaA__ABW81507
  source 1..1701: mol_type = other RNA
atgaaagcaaaactactagttctgttgtgtacatttacagctacatatgcagacacaatatgtataggctaccatgcgaacaactcaactgacactgttgacacagtacttgagaagaacgtgacagtgacacactctgtcaacctacttgaggacagtcacaatggaaaactatgccgactaaaaggaacagtcccactacaattgggtaattgcagcattgccggatggatcttaggaaatccagaatgcgaatcactgttttctaaggaatcatggtcttacattgcagaaacaccaaaccctaaaaatggaacatgttacccagggtatttcgccgactatgaggaactgagggagcaattgagctcagtatcatcattcgagagatttgaaatattccccaaggatagctcatggcccaaccacactgtaaccaaaggagtgacggcatcatgctcccataatgggaaaagcagcttttacaaaaatttgctatggctgacggagaagaatggcttgtacccgaatctgagcaagtcctatgtaaacaaaaagggaaaagaagtccttgtgctatggggtgttcatcacccgtctaacatgggggaccaacgggccatctatcataaagaaaatgcttatgtttctgtgttgtcttcacattatagcagaagattcaccccagaaatagcaaaaagaccaaaagtaagagatcaagaagggagaattaactactactggactctgctggaacccggggacacaataatatttgaggcaaatggaaatctaatagcgccgtggtacgctttcgcactgagtagaggctttgggtcaggaatcatcatctcaaatgcatcaatgggtgaatgtgacgctaagtgtcaaacaccccaaggagctataaacagtagtctccccttccagaatgtacacccagtcacaataggagagtgtccaaagtatgtcaggagtacaaaattaaggatggttacaggactaaggaacgtcccatccattcaatccagaggtttgtttggagccattgccggtttcattgaaggagggtggactggaatgatagatggatggtatggttatcatcatcaaaatgaacaaggatctggctatgctgcggaccaaaaaagcacacaaaatgccattaatgggattacaaacaaggtgaattctataatcgagaaaatgaacactcaattcacagctgtaggcaaagaattcaacaaattagaaagaaggatggaaaacttaaataagaaagttgatgatggatttctggacatttggacatataatgcagaattgttagttctcctggaaaatgaaaggactttggattttcatgactcaaatgtgaagaacctgtatgagaaagtgaaaacccaattgaagaataatgccaaagaaatagggaacgggtgttttgaattctatcacaagtgtaacaatgaatgcatggaaagtgtgaaaaatggaacttatgactatccaaaatattccaaagaatcaaagttaaacagggaaaaaattgatggagtgaaattggaatcaatgggagtctatcagattctggcgatctactcaactgtcgccagttcgctggtgcttttggtctccctgggggcaatcagcttctggatgtgttctaatgggtctttgcagtgtagaatatgcatctga

SEQ ID NO: 32623 - RNA, 1698 nt, synthetic construct
  misc_feature 1..1698: note = hemagglutinin__InfluenzaA__ABW81508
  source 1..1698: mol_type = other RNA
atgaaagtaaaactactggtcctgttatgtacatttacagctacatatgcagacacaatatgtataggctaccatgccaacaactcaaccgacactgttgacacagtacttgagaagaatgtgacagtgacacactctgtcaacctacttgaggacagtcacaatggaaaactatgtctactaaaaggaatagccccactacaattgggtaattgcagcgttgccggatggatcttaggaaacccagaatgcgaattactgatttccaaggaatcatggtcctacattgtagaaacaccaaatcctgagaatggaacatgttacccagggtatttcgccgactatgaggaactgagggagcaattgagttcagtatcttcatttgagaggttcgaaatattccccaaagaaagctcatggcccaaccacaccgtaaccggagtatcagcatcatgctcccataatgggaaaagcagtttttacagaaatttgctatggctgacgaggaagaatggtttgtacccaaacctgagcaagtcctatgcaaacaacaaagagaaagaagtccttgtactatggggtgttcatcacccgcctaacataggggaccaaagggccctctatcatacagaaaatgcttatgtctctgtagtgtcttcacattatagcagaagattcaccccagaaatagccaaaagacccaaagtaagagatcaggaaggaagaatcaactactactggactctgctggaacccggggatacaataatatttgaggcaaatggaaatctaatagcgccaaggtatgctttcgcactgagtagaggctttggatcaggaatcatcacctcaaatgcaccaatggatgaatgtgatgcgaagtgtcaaacacctcagggagctataaacagcagtcttcctttccagaatgtacacccagtcacaataggagagtgtccaaagtatgtcaggagtgcaaaattaaggatggttacaggactaaggaacatcccatccattcaatccagaggtttgtttggagccattgccggtttcattgaaggggggtggactggaatggtagatggttggtatggttatcatcatcagaatgagcaaggatctggctatgctgcagatcaaaaaagcacacaaaatgccattaacgggattacaaacaaggtgaattctgtaattgagaaaatgaacactcaattcacagctgtgggcaaagaattcaacaaattggaaagaaggatggaaaacttaaataaaaaagttgatgatgggtttctagacatttggacatataatgcagaattgttggttctactggaaaatgaaaggactttggatttccatgactccaatgtgaagaatctgtatgagaaagtaaaaagccaattaaagaataatgccaaagaaataggaaacgggtgttttgaattctatcacaagtgtaacgatgaatgcatggagagtgtgaaaaatggaacttatgactatccaaaatattccgaagaatcaaagttaaacagggagaaaattgatggagtgaaattggaatcaatgggagtctatcagattctggcgatctactcaacagtcgccagttccctggttcttttggtctccctgggggcaatcagcttctggatgtgttccaatgggtctttgcagtgtagaatatgcatctaa

SEQ ID NO: 32624 - RNA, 1701 nt, synthetic construct
  misc_feature 1..1701: note = hemagglutinin__InfluenzaA__ABW81509
  source 1..1701: mol_type = other RNA
atgaaagcaaaactactagttctgttgtgtacatttacagctacatatgcagacacaatatgtataggctaccatgcgaacaactcaactgacactgttgacacagtacttgagaagaacgtgacagtgacacactctgtcaacctacttgaggacagtcacaatggaaaactatgccgactaaaaggaacagccccactacaattgggtaattgcagcattgccggatggatcttaggaaatccagaatgcgaatcactgttttctaaggaatcatggtcttacattgcagaaacaccaaaccctaaaaatggaacatgttacccagggtatttcgccgactatgaggaactgagggagcaattgagctcagtatcatcattcgagagatttgaaatattccccaaggatagctcatggcccaaccacactgtaaccaaaggagtgacggcatcatgctcccataatgggaaaagcagcttttacaaaaatttgctatggctgacggagaagaatggcttgtacccaaatctgagcaagtcctatgtaaacaaaaagggaaaagaagtccttgtgctatggggtgttcatcacccgtctaacatgggggaccaacgggccatctatcataaagaaaatgcttatgtttctgtgttgtcttcacattatagcagaagattcaccccagaaatagcaaaaagaccaaaagtaagagatcaagaagggagaattaactactactggactctgctggaacccggggacacaataatatttgaggcaaatggaaatctaatagcgccgtggtacgctttcgcactgagtagaggctttgggtcaggaatcatcatctcaaatgcatcaatgggtgaatgtgacgctaagtgtcaaacaccccaaggagctataaacagtagtctccccttccagaatgtacacccagtcacaataggagagtgtccaaagtatgttaggagtacaaaattaaggatggttacaggactaaggaacgtcccatccattcaatccagaggtttgtttggagccattgccggtttcattgaaggagggtggactggaatgatagatggatggtatggttatcatcatcaaaatgaacaaggatctggctatgctgcggaccaaaaaagcacacaaaatgccattaatgggattacaaacaaggtgaattctataatcgagaaaatgaacactcaattcacagctgtaggcaaagaattcaacaaattagaaagaaggatggaaaacttaaataagaaagttgatgatggatttctggacatttggacatataatgcagaattgttagttctcctggaaaatgaaaggactttggattttcatgactcaaatgtgaagaacctgtatgagaaagtgaaaacccaattgaagaataatgccaaagaaatagggaacgggtgttttgaattctatcacaagtgtaacaatgaatgcatggaaagtgtgaaaaatggaacttatgactatccaaaatattccaaagaatcaaagttaaacagggaaaaaattgatggagtgaaattggaatcaatgggagtctatcagattctggcgatctactcaactgtcgccagttcgctggtgcttttggtctccctgggggcaatcagcttctggatgtgttctaatgggtctttgcagtgtagaatatgcatctga

SEQ ID NO: 32625 - RNA, 1698 nt, synthetic construct
  misc_feature 1..1698: note = hemagglutinin__InfluenzaA__ABW81511
  source 1..1698: mol_type = other RNA
atgaaagcaaaactactggtcctgttatgtacatttacagctacatatgcagacacaatatgtataggctaccatgccaacaactcaaccgacactgttgacacagtacttgagaagaatgtgacagtgacacactctgtcaacctacttgaggacagtcacaatggaaaactatgtctactaaaaggaatagccccactacaattgggtaattgcagcgttgccggatggatcttaggaaacccagaatgcgaattactgatttccaaggaatcatggtcctacattgtagaaacaccaaatcctgagaatggaacatgttacccagggtatttcgccgactatgaggaactgagggagcaattgagttcagtatcttcatttgagagattcgaaatattccccaaaggaagctcatggcccaaccacaccgtaaccggagtatcagcatcatgctcccataatgggaaaagcagtttttacagaaatttgctatggctgacggggaagaatggtttgtacccaaacctgagcatgtcctatgtaaacaacaaagagaaagaagtccttgtgctatggggtgttcatcacccacctaacatagggaaccaaagggccctctaccatacagaaaatgcttatgtctctgtagtgtcttcacattatagcagaagattcaccccagaaatagccaaaagacccaaagtaagagatcaggaaggaagaatcaactactactggactctgctggaacccggggactcaataatatttgaggcaaatggaaatctaatagcgccatggtatgctttcgcactgagtagaggctttggatcaggaatcatcacctcaaatgcaccaatggatgaatgtgatgcgaagtgtcaaacacctcagggagctataaacagtagtcttcctttccagaatgtacacccagttacaataggagagtgtccaaagtatgtcaggagtgcaaaattaaggatggttacaggactaaggaacatcccatccattcaatccagaggtttgtttggagccattgccggtttcattgaaggggggtggactggaatggtagatgggtggtatggttatcatcatcagaatgagcaaggatctggctatgctgcagatcaaaaaagcacacaaaatgccattaacgggattacaaacaaggtgaattctgtaattgagaaaatgaacactcaattcacagctgtgggcaaagaattcaacaaattagaaagaaggatggaaaacttaaataaaaaagttgatgatgggtttctagacatttggacatataatgcagaattgttggttctactggaaaatgaaaggactttggatttccatgactccaatgtgaagaatctgtatgagaaagtaaaaagccaattaaagaataatgccaaagaaataggaaacgggtgttttgaattctatcacaagtgtaacaatgaatgcatggaaagtgtgaaaaatggaacttatgactatccaaaatattccgaagaatcaaagttaaacagggagaaaattgatggagtaaaattggaatcaatgggagtctatcagattctggcgatctactcaactgtcgccagttccctggttcttttggtctccctgggggcaatcagcttctggatgtgttccaatgggtctttgcagtgtagaatatgcatctga

SEQ ID NO: 32626 - RNA, 1698 nt, synthetic construct
  misc_feature 1..1698: note = hemagglutinin__InfluenzaA__ABW81512
  source 1..1698: mol_type = other RNA
atgaaagcaaaactactggtcctgttatgtacatttacagctacatacgcagacacaatatgtataggctaccatgccaacaactcaaccgacactgttgacacagtacttgagaagaatgtgacagtgacacactctgtcaacctacttgaggacagtcacaatggaaaactatgtctactaaaaggaatagccccactacaattgggtaattgcagcgttgccggatggatcttaggaaacccagaatgcgaattactgatttccaaggaatcatggtcctacattgtagaaacaccaaatcccgagaatggaacatgttacccagggtatttcgccgactatgaggaactgagggagcaattgagttcagtatcttcatttgagagattcgaaatattccccaaaggaagctcatggcccaaccacaccgtaaccggagtatcagcatcatgctcccataatgggaaaagcagtttttacagaaatttgctatggctgacggggaagaatggtttgtacccaaacctgagcatgtcctatgtaaacaacaaagagaaagaagtccttgtgctatggggtgttcatcacccacctaacataggggaccaaagggccctctaccatacagaaaatgcttatgtctctgtagtgtcttcacattatagcagaagattcaccccagaaatagccaaaagacccaaagtaagagatcaggaaggaagaatcaactactactggactctgctggaacccggggacacaataatatttgaggcaaatggaaatctaatagcgccatggtatgctttcgcactgagtagaggctttggatcaggaatcatcacctcaaatgcaccaatggatgaatgtgatgcgaagtgtcaaacacctcagggagctataaacagtagtcttcctttccagaatgtacacccagttacaataggagagtgtccaaagtatgtcaggagtgcaaaattaaggatggttacaggactaaggaacatcccatccattcaatccagaggtttgtttggagccattgccggtttcattgaaggggggtggactggaatggtagatgggtggtatggttatcatcatcagaatgagcaaggatctggctatgctgcagatcaaaaaagcacacaaaatgccattaacgggattacaaacaaggtgaattctgtaattgagaaaatgaacactcaattcacagctgtgggcaaagaattcaacaaattagaaagaaggatggaaaacttaaataaaaaagttgatgatgggtttctagacatttggacatataatgcagaattgttggttctactggaaaatgaaaggactttggatttccatgactccaatgtgaagaatctgtatgagaaagtaaaaagccaattaaagaataatgccaaagaaataggaaacgggtgttttgaattctatcacaagtgtaacaatgaatgcatggaaagtgtgaaaaatggaacttatgactatccaaaatattccgaagaatcaaagttaaacagggagaaaattgatggagtaaaattggaatcaatgggagtctatcagattctggcgatctactcaactgtcgccagttccctggttcttttggtctccctgggggcaatcagcttctggatgtgttccaatgggtctttgcagtgtagaatatgcatctga

SEQ ID NO: 32627 - RNA, 1698 nt, synthetic construct
  misc_feature 1..1698: note = hemagglutinin__InfluenzaA__ABW81513
  source 1..1698: mol_type = other RNA
atgaaagtaaaactactggtcctgttatgtacatttacagctacatatgcagacacaatatgtataggctaccatgccaacaactcaaccgacactgttgacacagtacttgagaagaatgtgacagtgacacactctgtcaacctacttgaggacagtcacaatggaaaactatgtctactaaaaggaatagccccattacaattgggtaattgcagcgttgccggatggatcttaggaaacccagaatgcgaattactgatttccaaggaatcatggtcctacattgtagaaacaccaaatcctgagaatggaacatgttacccagggtatttcgccgactatgaggaactgagggagcaattgagttcagtatcttcatttgagaggttcgaaatattccccaaagagagctcatggcccaaccacaccgtaaccggagtatcagcatcatgctcccataacgggaaaagcagtttttacagaaatttgctatggctgacggggaagaatggtttgtacccaaacctgagcaagtcctatgcaaacaacaaagagaaagaagtccttgtactatggggtgttcatcacccgcctaacataggggaccaaagggccctctatcatacagaaaatgcttatgtctctgtagtatcttcacattatagcagaagattcaccccagaaatagccaaaagacccaaggtgagagatcaggaaggaagaatcaactactactggactctgctggaacccggggatacaataatatttgaggcaaatggaaatctaatagcgccaaggtttgctttcgcactgagtagaggctttggatcaggaatcatcacctcaaatgcaccaatggatgaatgtgatgcgaagtgtcaaacacctcaaggagctataaacagcagtcttcctttccagaatgtacacccagtcacaataggggagtgtccaaagtatgtcaggagtgcaaaattaaggatggctacaggactaaggaacatcccatccattcaatccagaggtttgtttggagccattgccggtttcattgaaggggggtggactggaatggtagatggttggtatggttatcatcatcagaatgagcaaggatctgggtatgctgcagatcaaaaaagcacacaaaatgccattaacgggattacaaacaaggtgaattctgtaattgagaaaatgaacactcaattcacagctgtgggcaaagaattcagcaaattggagagaaggatggaaaacttaaataaaaaagttgatgatgggtttctagacatttggacatataatgcagaattgttggttctactggaaaatgaaaggactttggatttccatgactccaacgtgaagaatctgtatgagaaagtgaaaagccaattaaagaataatgccaaagaaataggaaacgggtgttttgaattctatcacaaatgtaacgatgaatgcatggagagtgtgaaaaatggaacttatgactatccaaaatattccgaagaatcaaagttaaacagggagaaaattgatggagtgaaattggaatcaatgggagtctatcagattctggcgatctactcaacagtcgccagttccctggttcttttggtctccctgggggcaatcagcttctggatgtgttccaatgggtctttgcagtgtagaatatgcatctaa

SEQ ID NO: 32628 - RNA, 1698 nt, synthetic construct
  misc_feature 1..1698: note = hemagglutinin__InfluenzaA__ABW81514
  source 1..1698: mol_type = other RNA
atgaaagtaaaactactggttctgttatgtacatttacagctacatatgcagacacaatatgtataagctaccatgccaacaactcaaccgacactgttgacacagtacttgagaagaatgtgacagtgacacactctgtcaacctacttgaggacagtcacaatggaaaactatgtctactaaaaggaatagccccactacaattgggtaattgcagcgttgccggatggatcttaggaaacccagaatgcgaattactgatttccaaggaatcatggtcctacattgtagaaacaccaaatcctgagaatggaacatgttacccagggtatttcgccgactatgaggaactgagggagcaattgagttcagtatcttcatttgagaggttcgaaatattccccaaagagagctcatggcccaaccacaccgtaaccggagtatcagcatcatgctcccataacgggaaaagcagtttttacagaaatttgctatggctgacggggaagaatggcttgtacccaaacctgagcaagtcctatgcaaacaacaaagagaaagaagtccttgtactatggggtgttcatcacccgcctaacataggggaccaaagggccctctatcatacagaaaatgcttatgtctctgtcgtgtcttcacattatagcagaagattcaccccagaaatagccaaaagacccaaggtgagagatcaggaaggaagaatcaactactactggactctgctggaacccggggatacaataatatttgaggcaaatggaaatctaatagcgccaaggtttgctttcgcactgagtagaggctttggatcaggaatcatcacctcaaatgcaccaatggatgaatgtgatgcgaagtgtcaaacacctcaaggagctataaacagcagtcttcctttccagaatgtacacccagtcacaataggagagtgtccaaagtatgtcaggagtgcaaaattaaggatggctacaggactaaggaacatcccatccattcaatccagaggtttgtttggagccattgccggtttcattgaaggggggtggactggaatggtagatggttggtatggttatcatcatcagaatgagcaaggatctgggtatgctgcagatcaaaaaagcacacaaaatgccattaacgggattacaaacaaggtgaattctgtaattgagaaaatgaacactcaattcacagctgtgggcaaagaattcagcaaattggagagaaggatggaaaacttaaataaaaaagttgatgatgggtttctagacatttggacatataatgcagaattgttggttctactggaaaatgaaaggactttggatttccatgactccaacgtgaagaatctgtatgagaaagtgaaaagccaattaaagaataatgccaaagaaataggaaacgggtgttttgaattctatcacaagtgtaacgatgaatgcatggagagtgtgaaaaatggaacttatgactatccaaaatattccgaagaatcaaagttaaacagggagaaaattgatggagtgaaattggaatcaatgggagtctatcagattctggcgatctactcaacagtcgccagttccctggttcttttggtctccctgggggcaatcagcttctggatgtgttccaatgggtctttgcagtgtagaatatgcatctaa

SEQ ID NO: 32629 - RNA, 1698 nt, synthetic construct
  misc_feature 1..1698: note = hemagglutinin__InfluenzaA__ABW81515
  source 1..1698: mol_type = other RNA
atgaaagtaaaactactggttctgttatgtacatttacagctacatatgcagacacaatatgtataggctaccatgccaacaactcaaccgacactgttgacacagtacttgagaagaatgtgacagtgacacactctgtcaacctacttgaggacagtcacaatggaaaactatgtctactaaaaggaatagccccactacaattgggtaattgcagcgttgccggatggatcttaggaaacccagaatgcgaattactgatttccaaggaatcatggtcctacattgtagaaacaccaaatcctgagaatggaacatgttacccagggtatttcgccgactatgaggaactgagggagcaattgagttcagtatcttcatttgagaggttcgaaatattccccaaagagagctcatggcccaaccacaccgtaaccggagtatcagcatcatgctcccataacgggaaaagcagtttttacagaaatttgctatggctgacggggaagaatggtttgtacccaaacctgagcaagtcctatgcaaacaacaaagagaaagaagtccttgtactatggggtgttcatcacccgcctaacataggggaccaaagggccctctatcatacagaaaatgcttatgtctctgtagtgtcttcacattatagcagaagattcaccccagaaatagccaaaagacccaaggtgagagatcaggaaggaagaatcaactactactggactctgctggaacccggggatacaataatatttgaggcaaatggaaatctaatagcgccaaggtttgctttcgcactgagtagaggctttggatcaggaatcatcacctcaaatgcaccaatggatgaatgtgatgcgaagtgtcaaacacctcaaggagctataaacagcagtcttcctttccagaatgtacacccagtcacaataggagagtgtccaaagtatgtcaggagtgcaaaattaaggatggctacaggactaaggaacatcccatccattcaatccagaggtttgtttggagccattgccggtttcattgaaggggggtggactggaatggtagatggttggtatggttatcatcatcagaatgagcaaggatctgggtatgctgcagatcaaaaaagcacacaaaatgccattaacgggattacaaacaaggtgaattctgtaattgagaaaatgaacactcaattcacagctgtgggcaaagaattcagcaaattggagagaaggatggaaaacttaaataaaaaagttgatgatgggtttctagacatttggacatataatgcagaattgttggttctactggaaaatgaaaggactttggatttccatgactccaacgtgaagaatctgtatgagaaagtgaaaagccaattaaagaataatgccaaagaaataggaaacgggtgttttgaattctatcacaagtgtaacgatgaatgcatggagagtgtgaaaaatggaacttatgactatccaaaatattccgaagaatcaaagttaaacagggagaaaattgatggagtgaaattggaatcaatgggagtctatcagattctggcgatctactcaacagtcgccagttccctggttcttttggtctccctgggggcaatcagcttctggatgtgttccaatgggtctttgcagtgtagaatatgcatctaa

SEQ ID NO: 32630 - RNA, 1698 nt, synthetic construct
  misc_feature 1..1698: note = hemagglutinin__InfluenzaA__ABW81516
  source 1..1698: mol_type = other RNA
atgaaagtaaaactactggttctgttatgtacatttacagctacatatgcagacacaatatgtataggctaccatgccaacaactcaaccgacactgttgacacagtacttgagaagaatgtgacagtgacacactctgtcaacctacttgaggacagtcacaatggaaaactatgtctactaaaaggaatagccccactacaattgggtaattgcagcgttgccggatggatcttaggaaacccagaatgcgaattattgatttccaaggaatcatggtcctacattgtagaaacaccaaatcctgagaatggaacatgttacccagggtatttcgccgactatgaggaactgagggagcaattgagttcagtatcttcatttgagaggttcgaaatattccccaaagagagctcatggcccaaccacaccgtaaccggagtatcagcatcatgctcccataacgggaaaagcagtttttacagaaatttgctatggctgacggggaagaatggcttgtacccaaacctgagcaagtcctatgcaaacaacaaagagaaagaagtccttgtactatggggtgttcatcacccgcctaacataggggaccaaagggccctctatcatacagaaaatgcttatgtctctgtagtgtcttcacattatagcagaagattcaccccagaaatagccaaaagacccaaggtgagagatcaggaaggaagaatcaactactactggactctgctggaacccggggatacaataatatttgaggcaaatggaaatctaatagcgccaaggtttgctttcgcactgagtagaggctttggatcaggaatcatcacctcaaatgcaccaatggatgaatgtgatgcgaagtgtcaaacacctcaaggagctataaacagcagtcttcctttccagaatgtacacccagtcacaataggagagtgtccaaagtatgtcaggagtgcaaaattaaggatggctacaggactaaggaacatcccatccattcaatccagaggtttgtttggagccattgccggtttcattgaaggggggtggactggaatggtagatggttggtatggttatcatcatcagaatgagcaaggatctgggtatgctgcagatcaaaaaagcacacaaaatgccattaacgggattacaaacaaggtgaattctgtaattgagaaaatgaacactcaattcacagctgtgggcaaagaattcagcaaattggagagaaggatggaaaacttaaataaaaaagttgatgatgggtttctagacatttggacatataatgcagaattgttggttctactggaaaatgaaaggactttggatttccatgactccaacgtgaagaatctgtatgagaaagtgaaaagccaattaaagaataatgccaaagaaataggaaacgggtgttttgaattctatcacaagtgtaacgatgaatgcatggagagtgtgaaaaatggaacttatgactatccaaaatattccgaagaatcaaagttaaacagggagaaaattgatggagtgaaattggaatcaatgggagtctatcagattctggcgatctactcaacagtcgccagttccctggttcttttggtctccctgggggcaatcagcttctggatgtgttccaatgggtctttgcagtgtagaatatgcatctaa

SEQ ID NO: 32631 - RNA, 1698 nt, synthetic construct
  misc_feature 1..1698: note = hemagglutinin__InfluenzaA__ABW81517
  source 1..1698: mol_type = other RNA
atgaaagtaaaactactggttctgttatgtacatttacagctacatatgcagacacaatatgtataggctaccatgccaacaactcaaccgacactgttgacacagtacttgagaagaatgtgacagtgacacactctgtcaacctacttgaggacagtcacaatggaaaactatgtctactaaaaggaatagccccactacaattgggtaattgcagcgttgccggatggatcttaggaaacccagaatgcgaattactgatttccaaggaatcatggtcctacattgtagaaacaccaaatcctgagaatggaacatgttacccagggtatttcgccgactatgaggaactgagggagcaattgagttcaatatcttcatttgagaggttcgaaatattccccaaagagagctcatggcccaaccacaccgtaaccggagtatcagcatcatgctcccataacgggaaaagcagtttttacagaaatttgctatggctgacgggaaagaatggcttgtacccaaacctgagcaagtcctatgcaaacaacaaagagaaagaagtccttgtactatggggtgttcatcacccgcctaacataggggaccaaagggccctctatcatacagaaaatgcttatgtctctgtagtgtcttcacattatagcagaagattcaccccagaaatagccaaaagacccaaggtgagagatcaggaaggaagaatcaactactactggactctgctggaacccggggatacaataatatttgaggcaaatggaaatctaatagcgccaaggtttgctttcgcactgagtagaggctttggatcaggaatcatcacctcaaatgcaccaatggatgaatgtgatgcgaagtgtcaaacacctcaaggagctataaacagcagtcttcctttccagaatgtacacccagtcacaataggagagtgtccaaagtatgtcaggagtgcaaaattaaggatggctacaggactaaggaacatcccatccattcaatccagaggtttgtttggagccattgccggtttcattgaaggggggtggactggaatggtagatggttggtatggttatcatcatcagaatgagcaaggatctgggtatgctgcagatcaaaaaagcacacaaaatgccattaacgggattacaaacaaggtgaattctgtaattgagaaaatgaacactcaattcacagctgtgggcaaagaattcagcaaattggagagaaggatggaaaacttaaataaaaaagttgatgatgggtttctagacatttggacatataatgcagaattgttggttctactggaaaatgaaaggactttggatttccatgactccaacgtgaagaatctgtatgagaaagtgaaaagccaattaaagaataatgccaaagaaataggaaacgggtgttttgaattctatcacaagtgtaacgatgaatgcatggagagtgtgaaaaatggaacttatgactatccaaaatattccgaagaatcaaagttaaacagggagaaaattgatggagtgaaattggaatcaatgggagtctatcagattctggcgatctactcaacagtcgccagttccctggttcttttggtctccctgggggcaatcagcttctggatgtgttccaatgggtctttgcagtgtagaatatgcatctaa

SEQ ID NO: 32632 - RNA, 1698 nt, synthetic construct
  misc_feature 1..1698: note = hemagglutinin__InfluenzaA__ABW81518
  source 1..1698: mol_type = other RNA
atgaaagtaaaactactggttctgttatgtacatatacagctacatatgcagacacaatatgtataggctaccatgccaacaactcaaccgacactgttgacacagtacttgagaagaatgtgacagtgacacactctgtcaacctacttgaggacagtcacaatggaaaactatgtctactaaaaggaatagccccattacaattgggtaattgcagcgttgccggatggatcttaggaaacccagaatgcgaattactgatttccaaggaatcatggtcctacattgtagaaacaccaaatcctgagaatggaacatgttacccagggtatttcgccgactatgaggaactgagggagcaattgagttcagtatcttcatttgagaggttcgaaatattccccaaagagagctcatggcccaaccacaccgtaaccggagtatcagcatcatgctcccataacgggaaaagcagtttttacagaaatttgctatggctgacggggaagaatggtttgtacccaaacctgagcaagtcctatgcaaacaacaaagagaaagaagtccttgtactatggggtgttcatcacccgcctaacataggggaccaaagggccctctatcatacagaaaatgcttatgtctctgtagtatcttcacattatagcagaagattcaccccagaaatagccaaaagacccaaggtgagagatcaggaaggaagaatcaactactactggactctgctggaacccggggatacaataatatttgaggcaaatggaaatctaatagcgccaaggtttgctttcgcactgagtagaggctttggatcaggaatcatcacctcaaatgcaccaatggatgaatgtgatgcgaagtgtcaaacacctcaaggagctataaacagcagtcttcctttccagaatgtacacccagtcacaataggggagtgtccaaagtatgtcaggagtgcaaaattaaggatggctacaggactaaggaacatcccatccattcaatccagaggtttgtttggagccattgccggtttcattgaaggggggtggactggaatggtagatggttggtatggttatcatcatcagaatgagcaaggatctgggtatgctgcagatcaaaaaagcacacaaaatgccattaacgggattacaaacaaggtgaattctgtaattgagaaaatgaacactcaattcacagctgtgggcaaagaattcagcaaattggagagaaggatggaaaacttaaataaaaaagttgatgatgggtttctagacatttggacatataatgcagaattgttggttctactggaaaatgaaaggactttggatttccatgactccaacgtgaagaatctgtatgagaaagtgaaaagccaattaaagaataatgccaaagaaataggaaacgggtgttttgaattctatcacaaatgtaacgatgaatgcatggagagtgtgaaaaatggaacttatgactatccaaaatattccgaagaatcaaagttaaacagggagaaaattgatggagtgaaattggaatcaatgggagtctatcagattctggcgatctactcaacagtcgccagttccctggttcttttggtctccctgggggcaatcagcttctggatgtgttccaatgggtctttgcagtgtagaatatgcatctaa

SEQ ID NO: 32633 - RNA, 1698 nt, synthetic construct
  misc_feature 1..1698: note = hemagglutinin__InfluenzaA__ABW81519
  source 1..1698: mol_type = other RNA
atgaaagtaaaactactggttctgttatgtacatttacagctacatatgcagacacaatatgtataggctaccatgccaacaactcaaccgacactgttgacacagtacttgagaagaatgtgacagtgacacactctgtcaacctacttgaggacagtcacaatggaaaactatgtctactaaaaggaatagccccactacaattgggtaattgcagcgttgccggatggatcttaggaaacccagaatgcgaattactgatttccaaggaatcatggtcctacattgtagaaacaccaaatcctgagaatggaacatgttacccagggtatttcgccgactatgaggaactgagggagcaattgagttcagtatcttcatttgagaggttcgaaatattccccaaagagagctcatggcccaaccacaccgtaaccggagtatcagcatcatgctcccataacgggaaaagcagtttttacagaaatttgctatggctgacggggaagaatggtttgtacccaaacctgagcaagtcctatgcaaacaacaaagagaaagaagtccttgtactatggggtgttcatcacccgcctaacataggggaccaaagggccctctatcatacagaaaatgctcatgtctctgtagtgtcttcacattatagcagaagattcaccccagaaatagccaaaagacccaaggtgagagatcaggaaggaagaatcaactactactggactctgctggaacccggggatacaataatatttgaggcaaatggaaatctaatagcgccaaggtttgctttcgcactgagtagaggctttggatcaggaatcatcacttcaaatgcaccaatggatgaatgtgatgcgaagtgtcaaacacctcaaggagctataaacagcagtcttcctttccagaatgtacacccagtcacaataggagagtgtccaaagtatgtcaggagtgcaaaattaaggatggctacaggactaaggaacatcccatccattcaatccagaggtttgtttggagccattgccggtttcattgaaggggggtggactggaatggtagatggttggtatggttatcatcatcagaatgagcaaggatctgggtatgctgcagatcaaaaaagcacacaaaatgccattaacgggattacaaacaaggtgaattctgtaattgagaaaatgaacactcaattcacagctgtgggcaaagaattcagcaaattggagagaaggatggaaaacttaaataaaaaagttgatgatgggtttctagacatttggacatataatgcagaattgttggttctactggaaaatgaaaggactttggatttccatgactccaacgtgaagaatctgtatgagaaagtgaaaagccagttgaagaataatgccaaagaaataggaaacgggtgttttgaattctatcacaagtgtaacgatgaatgcatggagagtgtgaaaaatggaacttatgactatccaaaatattccgaagaatcaaagttaaacagggagaaaattgatggagtgaaattggaatcaatgggagtctatcagattctggcgatctactcaacagtcgccagttccctggttcttttggtctccctgggggcaatcagcttctggatgtgttccaatgggtctttgcagtgtagaatatgcatctaa

SEQ ID NO: 32634 - RNA, 1698 nt, synthetic construct
  misc_feature 1..1698: note = hemagglutinin__InfluenzaA__ABW81520
  source 1..1698: mol_type = other RNA
atgaaagtaaaactactggttctgttatgtacatttacagctacatatgcagacacaatatgtataggctaccatgccaacaactcaaccgacactgttgacacagtacttgagaagaatgtgacagtgacacactctgtcaacctacttgaggacagtcacaatggaaaactatgtctactaaaaggaatagccccattacaattgggtagttgcagcgttgccggatggatcttaggaaacccagaatgcgaattactgatttccaaggaatcatggtcctacattgtagaaacaccaaatcctgagaatggaacatgttacccagggtatttcgccgactatgaggaactgagggagcaattgagttcagtatcttcatttgagaggttcgaaatattccccaaagagagctcatggcccaaccacaccgtaaccggagtatcagcatcatgctcccataacgggaaaagcagtttttacagaaatttgctatggctgacggggaagaatggtttgtacccaaacctgagcaagtcctatgcaaacaacaaagagaaagaagtccttgtactatggggtgttcatcacccgcctaacataggggaccaaagggccctctatcatacagaaaatgcttatgtctctgtagtatcttcacattatagcagaagattcaccccagaaatagccaaaagacccaaggtgagagatcaggaaggaagaatcaactactactggactctgctggaacccggggatacaataatatttgaggcaaatggaaatctaatagcgccaaggtttgctttcgcactgagtagaggctttggatcaggaatcatcacctcaaatgcaccaatggatgaatgtgatgcgaagtgtcaaacacctcaaggagctataaacagcagtcttcctttccagaatgtacacccagtcacaataggggagtgtccaaagtatgtcaggagtgcaaaattaaggatggctacaggactaaggaacatcccatccattcaatccagaggtttgtttggagccattgccggtttcattgaaggggggtggactggaatggtagatggttggtatggttatcatcatcagaatgagcaaggatctgggtatgctgcagatcaaaaaagcacacaaaatgccattaacgggattacaaacaaggtgaattctgtaattgagaaaatgaacactcaattcacagctgtgggcaaagaattcagcaaattggagagaaggatggaaaacttaaataaaaaagttgatgatgggtttctagacatttggacatataatgcagaattgttggttctactggaaaatgaaaggactttggatttccatgactccaacgtgaagaatctgtatgagaaagtgaaaagccaattaaagaataatgccaaagaaataggaaacgggtgttttgaattctatcacaaatgtaacgatgaatgcatggagagtgtgaaaaatggaacttatgactatccaaaatattccgaagaatcaaagttaaacagggagaaaattgatggagtgaaattggaatcaatgggagtctatcagattctggcgatctactcaacagtcgccagttccctggttcttttggtctccctgggggcaatcagcttctggatgtgttccaatgggtctttgcagtgtagaatatgcatctaa

SEQ ID NO: 32635 - RNA, 1698 nt, synthetic construct
  misc_feature 1..1698: note = hemagglutinin__InfluenzaA__ABW81521
  source 1..1698: mol_type = other RNA
atgaaagtaaaactactggttctgttatgtacatttacagctacatatgcagacacaatatgtataggctaccatgccaacaactcaaccgacactgttgacacagtacttgagaagaatgtgacagtgacacactctgtcaacctacttgaggacagtcacaatggaaaactatgtctactaaaaggaatagccccactacaattgggtaattgcagcgttgccggatggatcttaggaaacccagaatgcgaattactgatttccaaggaatcatggtcctacattgtagaaacaccaaatcctgagaatggaacatgttacccagggtatttcgccgactatgaggaactgagggagcaattgagttcagtatcttcatttgagaggttcgaaatattccccaaagagagctcatggcccaaccacaccgtaaccggagtatcagcatcatgctcccataacgggaaaagcagtttttacagaaatttgctatggctgacggggaagaatggcttgtacccaaacctgagcaagtcctatgcaaacaacaaagagaaagaagtccttgtactatggggtgttcatcacccgcctaacataggggaccaaagggccctctatcatacagaaaatgcttatgtctctgtagtgtcttcacattatagcagaagattcaccccagaaatagccaaaagacccaaggtgagagatcaggaaggaagaatcaactactactggactctgctggaacccggggatacaataatatttgaggcaaatggaaatctaatagcgccaaggtttgctttcgcactgagtagaggctttggatcaggaatcatctcctcaaatgcaccaatggatgaatgtgatgcgaagtgtcaaacacctcaaggagctataaacagcagtcttcctttccagaatgtacacccagtcacaataggagagtgtccaaagtatgtcaggagtgcaaaattaaggatggctacaggactaaggaacatcccatccattcaatccagaggtttgtttggagccattgccggtttcattgaaggggggtggactggaatggtagatggttggtatggttatcatcatcagaatgagcaaggatctgggtatgctgcagatcaaaaaagcacacaaaatgccattaacgggattacaaacaaggtgaattctgtaattgagaaaatgaacactcaattcacagctgtgggcaaagaattcagcaaattggagagaaggatggaaaacttaaataaaaaagttgatgatgggtttctagacatttggacatataatgcagaattgttggttctactggaaaatgaaaggactttggatttccatgactccaacgtgaagaatctgtatgagaaagtgaaaagccaattaaagaataatgccaaagaaataggaaacgggtgttttgaattctatcacaagtgtaacgatgaatgcatggagagtgtgaaaaatggaacttatgactatccaaaatattccgaagaatcaaagttaaacagggagaaaattgatggagtgaaattggaatcaatgggagtctatcagattctggcgatctactcaacagtcgccagttccctggttcttttggtctccctgggggcaatcagcttctggatgtgttccaatgggtctttgcagtgtagaatatgcatctaa

SEQ ID NO: 32636 - RNA, 1698 nt, synthetic construct
  misc_feature 1..1698: note = hemagglutinin__InfluenzaA__ABW81522
  source 1..1698: mol_type = other RNA
atgaaagtaaaactactggttctgttatgtacatttacagctacatatgcagacacaatatgtataggctaccatgccaacaactcaaccgacactgttgacacagtacttgagaagaatgtgacagtgacacactctgtcaacctacttgaggacagtcacaatggaaaactatgtctactaaaaggaatagccccactacaattgggtaattgcagcgttgccggatggatcttaggaaacccagaatgcgaattactgatttccaaggaatcatggtcctacattgtagaaacaccaaatcctgagaatggaacatgttacccagggtatttcgccgactatgaggaactgagggagcaattgagttcagtatcttcatttgagaggttcgaaatattccccaaagagagctcatggcccaaccacaccgtaaccggagtatcagcatcatgctcccataacgggaaaagcagtttttacagaaatttgctatggctgacggggaagaatggcttgtacccaaacctgagcaagtcctatgcaaacaacaaagagaaagaagtccttgtactatggggtgttcatcacccgcctaacataggggaccaaagggccctctatcatacagaaaatgcttatgtctctgtagtgtcttcacattatagcagaagattcaccccagaaatagccaaaagacccaaggtgagagatcaggaaggaagaatcaactactactggactctgctggaacccggggatacaataatatttgaggcaaatggaaatctaatagcgccaaggtttgctttcgcactgagtagaggctttggatcaggaatcatcacctcaaatgcaccaatggatgaatgtgatgcgaagtgtcaaacacctcaaggagctataaacagcagtcttcctttccagaatgtacacccagtcacaataggggagtgtccaaagtatgtcaggagtgcaaaattaaggatggctacaggactaaggaacatcccatccattcaatccagaggtttgtttggagccattgccggtttcattgaaggggggtggactggaatggtagatggttggtatggttatcatcatcagaatgagcaaggatctgggtatgctgcagatcaaaaaagcacacaaaatgccattaacgggattacaaacaaggtgaattctgtaattgagaaaatgaacactcaattcacagctgtgggcaaagaattcagcaaattggagagaaggatggaaaacttaaataaaaaagttgatgatgggtttctagacatttggacatataatgcagaattgttggttctactggaaaatgaaaggactttggatttccatgactccaacgtgaagaatctgtatgagaaagtgaaaagccaattaaagaataatgccaaagaaataggaaacgggtgttttgaattctatcacaagtgtaacgatgaatgcatggagagtgtgaaaaatggaacttatgactatccaaaatattccgaagaatcaaagttaaacagggagaaaattgatggagtgaaattggaatcaatgggagtctatcagattctggcgatctactcaacagtcgccagttccctggttcttttggtctccctgggggcaatcagcttctggatgtgttccaatgggtctttgcagtgtagaatatgcatctaa

SEQ ID NO: 32637 - RNA, 1698 nt, synthetic construct
  misc_feature 1..1698: note = hemagglutinin__InfluenzaA__ABW81523
  source 1..1698: mol_type = other RNA
atgaaagtaaaactactggttctgttatgtacatttacagctacatatgcagacacaatatgtataggctaccatgccaacaactcaaccgacactgttgacacagtacttgagaagaatgtgacagtgacacactctgtcaacctacttgaggacagtcacaatggaaaactatgtctactaaaaggaatagccccattacaattgggtaattgcagcgttgccggatggatcttaggaaacccagaatgcgaattactgatttccaaggaatcatggtcctacattgtagaaacaccaaatcctgagaatggaacatgttacccagggtatttcgccgactatgaggaactgagggagcaattgagttcagtatcttcatttgagaggttcgaaatattccccaaagagagctcatggcccaaccacaccgtaaccggagtatcagcatcatgctcccataacgggaaaagcagtttttacagaaatttgctatggctgacggggaagaatggtttgtacccaaacctgagcaagtcctatgcaaacaacaaagagaaagaagtccttgtactatggggtgttcatcacccgcctaacataggggaccaaagggccctctatcatacagaaaatgcttatgtctctgtagtatcttcacattatagcagaagattcaccccagaaatagccaaaagacccaaggtgagagatcaggaaggaagaatcaactactactggactctgctggaacccggggatacaataatatttgaggcaaatggaaatctaatagcgccaaggtttgctttcgcactgagtagaggctttggatcaggaatcatcacctcaaatgcaccaatggatgaatgtgatgcgaagtgtcaaacacctcaaggagctataaacagcagtcttcctttccagaatgtacacccagtcacaataggggagtgtccaaagtatgtcaggagtgcaaaattaaggatggctacaggactaaggaacatcccatccattcaatccagaggtttgtttggagccattgccggtttcattgaaggggggtggactggaatggtagatggttggtatggttatcatcatcagaatgagcaaggatctgggtatgctgcagatcaaaaaagcacacaaaatgccattaacgggattacaaacaaggtgaattctgtaattgagaaaatgaacactcaattcacagctgtgggcaaagaattcagcaaattggagagaaggatggaaaacttaaataaaaaagttgatgatgggtttctagacatttggacatataatgcagaattgttggttctactggaaaatgaaaggactttggatttccatgactccaacgtgaagaatctgtatgagaaagtgaaaagccaattaaagaataatgccaaagaaataggaaacgggtgttttgaattctatcacaaatgtaacgatgaatgcatggagagtgtgaaaaatggaacttatgactatccaaaatattccgaagaatcaaagttaaacagggagaaaattgatggagtgaaattggaatcaatgggagtctatcagattctggcgatctactcaacagtcgccagttccctggttcttttggtctccctgggggcaatcagcttctggatgtgttccaatgggtctttgcagtgtagaatatgcatctaa

SEQ ID NO: 32638 - RNA, 1698 nt, synthetic construct
  misc_feature 1..1698: note = hemagglutinin__InfluenzaA__ABW81524
  source 1..1698: mol_type = other RNA
atgaaagtaaaactactggttctgttatgtacatttacagctacatatgcagacacaatatgtataggctaccatgccaacaactcaaccgacactattgacacagtacttgagaagaatgtgacagtgacacactctgtcaacctacttgaggacagtcacaatggaaaactatgtctactaaaaggaatagccccactacaattgggtaattgcagcgttgccggatggatcttaggaaacccagaatgcgaattactgatttccaaggaatcatggtcctacattgtagaaacaccaaatcctgagaatggaacatgttatccagggtatttcgccgactatgaggaactgagggagcaattgagttcagtatcttcatttgagaggttcgaaatattccccaaagagagctcatggcccaaccacaccgtaaccggagtatcagcatcatgctcccataacgggaaaagcagtttttacagaaatttgctatggctgacggggaagaatggcttgtacccaaacctgagcaagtcctatgcaaacaacaaagagaaagaagtccttgtactatggggtgttcatcacccgcctaacataggggaccaaagggccctctatcatacagaaaatgcttatgtctctgtagtgtcttcacattatagcagaagattcaccccagaaatagccaaaagacccaaggtgagagatcaggaaggaagaatcaactactactggactctgctggaacccggggatacaataatatttgaggcaaatggaaatctaatagcgccaaggtttgctttcgcactgagtagaggctttggatcaggaatcatcacctcaaatgcaccaatggatgaatgtgatgcgaagtgtcaaacacctcaaggagctataaacagcagtcttcctttccagaatgtacacccagtcacaataggagagtgtccaaagtatgtcaggagtgcaaaattaaggatggctacaggactaaggaacatcccatccattcaatccagaggtttgtttggagccattgccggtttcattgaaggggggtggactggaatggtagatggttggtatggttatcatcatcagaatgagcaaggatctgggtatgctgcagatcaaaaaagcacacaaaatgccattaacgggattacaaacaaggtgaattctgtaattgagaaaatgaacactcaattcacagctgtgggcaaagaattcagcaaattggagagaaggatggaaaacttaaataaaaaagttgatgatgggtttctagacatttggacatataatgcagaattgttggttctactggaaaatgaaaggactttggatttccatgactccaacgtgaagaatctgtatgagaaagtgaaaagccaattaaagaataatgccaaagaaataggaaacgggtgttttgaattctatcacaagtgtaacgatgaatgcatggagagtgtgaaaaatggaacttatgactatccaaaatattccgaagaatcaaagttaaacagggagaaaattgatggagtgaaattggaatcaatgggagtctatcagattctggcgatctactcaacagtcgccagttccctggttcttttggtctccctgggggcaatcagcttctggatgtgttccaatgggtctttgcagtgtagaatatgcatctaa

SEQ ID NO: 32639 - RNA, 1698 nt, synthetic construct
  misc_feature 1..1698: note = hemagglutinin__InfluenzaA__ABW81526
  source 1..1698: mol_type = other RNA
atgaaagtaaaactactggtcctgttatgcacatttacagctacatatgcagacacaatatgtataggctaccatgccaacaactcaaccgacactgttgacacagtacttgaaaagaatgtgacagtgacacactctgtcaacctgcttgaggacagtcacaatggaaaactatgtctattaaaaggaatagccccactacaattgggtaattgcagcgttgccgggtggatcttaggaaacccagaatgcgaattactgatttccaaggagtcatggtcctacattgtagaaaaaccaaatcctgagaatggaacatgttacccagggcatttcgctgactatgaggaactgagggagcaattgagttcagtatcttcatttgagaggttcgaaatattccccaaagaaagctcatggcccaaccacaccgtaaccggagtatcagcatcatgctcccataatgggaaaagcagtttttacaaaaatttgctatggctgacggggaagaatggtttgtacccaaacctgagcaagtcctatgcaaacaacaaagagaaagaagtccttgtactatggggtgttcatcacccgccaaacataggtgaccaaaaggccctctatcatacagaaaatgcttatgtctctgtagtgtcttcacattatagcagaaaattcaccccagaaatagccaaaagacccaaagtaagagatcaagaaggaagaatcaactactactggactctgcttgaacccggggatacaataatatttgaggcaaatggaaatctaatagcgccaagatatgctttcgcactgagtagaggctttggatcaggaatcatcaactcaaatgcaccaatgggtaaatgtgatgcgaagtgccaaacacctcagggagctataaacagcagtcttcctttccagaatgtacacccagtcacaataggagagtgtccaaagtatgtcaggagtgcaaaattaaggatggttacaggactaaggaacatcccatccattcaatccagaggtttgtttggagccattgccggtttcattgaaggggggtggactggaatggtagatggttggtatggttatcatcatcagaatgagcaaggatctggctatgctgcagatcaaaaaagcacacaaaatgccattaatgggattacaaacaaggtgaattccgtaattgagaaaatgaacactcaattcacagcagtgggcaaagaattcaacaaattggaaagaaggatggaaaacttaaataaaaaagttgatgatgggtttatagacatttggacatataatgcagaactgttggttctactggaaaatgaaaggactttggatctccatgactccaatgtgaagaatctgtatgagaaagtaaaaagccagttaaagaataatgccaaagaaataggaaatgggtgttttgaattctatcacaagtgtaacgatgaatgcatggagagtgtaaaaaatggaacttatgactatccaaaatattccgaagaatcaaagttaaacagggagaaaattgatggagtgaaattggaatcaatgggagtctatcagattctggcgatctactcaacagtcgccagttctctggttcttttggtctccctgggggcaatcagcttctggatgtgttccaatgggtctttgcagtgtagaatatgcatctaa

SEQ ID NO: 32640 - RNA, 1698 nt, synthetic construct
  misc_feature 1..1698: note = hemagglutinin__InfluenzaA__ABW81527
  source 1..1698: mol_type = other RNA
atgaaagtaaaactactggttctgttatgtacatttacagctacatatgcagacacaatatgtataggctaccatgccaacaactcaaccgacactgttgacacagtacttgagaagaatgtgacagtgacacactctgtcaacctacttgaggacagtcacaatgggaaactatgtctactaaaaggaatagccccactacaattgggtaattgcagcgttgccggatggatcttaggaaacccagaatgcgaattactgatttccaaggaatcatggtcctacattgtagaaacaccaaatcctgagaatggaacatgttacccagggtatttcgccgactatgaggaactgagggagcaattgagttcagtatcttcatttgagaggttcgaaatattccccaaagagagctcatggcccaaccacaccgtaaccggagtatcagcatcatgctcccataacgggaaaagcagtttttacagaaatttgctatggctgacggggaagaatggtttgtatccaaacctgagcaagtcctatgcaaacaacaaagagaaagaagtccttgtactatggggtgttcatcacccgcctaacataggggaccaaagggccctctatcatacagaaaatgcttatgtctctgtagtgtcttcacattatagcagaagattcaccccagaaatagccaaaagacccaaggtgagaaatcaggaaggaagaatcaactactactggactctgctggaacccggggatacaataatattcgaggcaaatggaaatctaatagcaccaaggtttgctttcgcactgagtagaggctttggatcaggaatcatcacctcaaatgcaccaatggatgaatgtgatgcgaagtgtcaaacacctcagggagctataaacagcagccttcctttccagaatgtacacccagtcacaataggagagtgtccaaagtatgtcaggagtgcaaaattaaggatggctacaggactaaggaacatcccatccattcaatccagaggtttgtttggagccattgccggtttcattgaagggggttggactggaatggtagatggttggtatggttatcatcatcagaatgagcaagggtctgggtatgctgcagatcaaaaaagcacacaaaatgccattaacgggattacaaacaaggtgaattctgtaattgagaaaatgaacactcaattcacagctgtgggcaaagaattcagcaaattggagagaaggatggaaaacttaaataagaaagttgatgatgggtttctagacatttggacatataatgcagaattgttggttctactggaaaatgaaaggactttggatttccatgactccaacgtgaagaatctgtatgagaaagtgaaaagccaattaaagaataatgccaaagaaataggaaacgggtgctttgaattctatcacaagtgtaacgatgaatgcatggagagtgtgaaaaatggaacttatgactatccaaaatattccgaagaatcaaagttaaacagggagaaaattgatggagtgaaattggaatcaatgggagtctatcagattctggcgatctactcaacagtcgccagttccctggttcttttggtctccctgggggcaatcagcttctggatgtgttccaatgggtctttgcagtgtagaatatgcatctaa

SEQ ID NO: 32641 - RNA, 1698 nt, synthetic construct
  misc_feature 1..1698: note = hemagglutinin__InfluenzaA__ABW81528
  source 1..1698: mol_type = other RNA
atgaaagtaaaactactggttctgttatgtacatttacagctacatatgcagacacaatatgtataggctaccatgccaacaactcgaccgacactgttgacacagtacttgagaagaatgtgacagtgacacactctgtcaacctacttgaggacagtcacaatggaaaactatgtctactaaaaggaatagccccactacaattgggtaattgcagcgttgccggatggatcttaggaaacccagaatgcgaattactgatttccaaggaatcatggtcctacattgtagaaacaccaaatcctgagaatggaacatgttacccagggcatttcgccgactatgaggagctgagggagcaattgagttcagtatcttcatttgagaggttcgaaatattccccaaagagagctcatggcccaaccacaccgtaaccggagtatcagcatcatgctcccataacgggaaaagcagtttctacagaaatttgctatggctgacggggaagaatggtttgtatccaaacctgagcaagtcctatgcaaacaacaaagagaaagaagtccttgtactgtggggtattcatcacccgcctaacataggggaccaaagggccctctatcatacagaaaatgcttatgtctctgtagtgtcttcacattatagcagaagattcaccccagaaatagccaaaagacccaaggtaagagatcaggaaggaagaatcaactactactggactcttctggaacccagggatacaataatatttgaggcaaatggaaatctaatagcaccaaggtttgctttcgcactgagtagaggctttggatcaggaatcatcacctcaaatgcaccaatggatgaatgtgatgcgaagtgtcaaacacctcagggagctataaacagcagtcttcctttccagaatgtacacccagtcacaataggagagtgtccaaagtatgtcaggagtgcaaaattaagaatggttacaggactaaggaacatcccatccattcaatccagaggtctgtttggagccattgccggtttcattgaaggggggtggactggaatggtagatggttggtatggttatcaccatcagaatgagcaaggatctgggtatgctgcagatcaaaaaagcacacaaaatgccattaacgggattacaaacaaggtgaattctgtaattgagaaaatgaacactcaattcacagctgtgggcaaagaattcaacaaattggaaagaaggatggaaaacttaaataaaaaagttgatgatgggtttctagacatttggacatataacgcagaattgttggttctactagaaaatgaaaggactttggacttccatgactccaacgtgaagaatctgtatgagaaagtaaaaagccaattaaagaataatgccaaagaaataggaaacgggtgttttgaattctatcacaagtgtaacgatgaatgcatggagagtgtgaaaaatggaacttatgactatccaaaatattccgaagaatcaaagttgaacagggagaaaattgatggagtgaaattggaatcaatgggagtctatcagattctggcgatctactcaacagtcgccagttccctggttcttttggtctccctgggggcaatcagcttctggatgtgttccaatgggtctttgcagtgtagaatatgcatctaa

SEQ ID NO: 32642 - RNA, 1698 nt, synthetic construct
  misc_feature 1..1698: note = hemagglutinin__InfluenzaA__ABW81529
  source 1..1698: mol_type = other RNA
atgaaagtaaaactactgatcctgttatgtacatttacagctacatatgcagacacaatatgtataggctaccatgccaacaactcaaccgacactgttgacacagtacttgagaagaatgtgacagtgacacactctgtcaacctacttgaggacagtcacaatggaaaactatgtctactaaaaggaatagcccccctacaattgggtaattgcagcgttgccggatggatcttaggaaacccagaatgcgaattactgatttccagggaatcatggtcctacattgtagaaacaccaaatcctgagaatggaacatgttacccagggtatttcgccgactatgaggagctaagggagcaattgagttcagtatcttcatttgagagattcgaaatattccccaaagaaagctcatggcccaaccacaccgtaaccggagtgtcagcatcatgctcccataatgggaaaagcagtttttacagaaatttgctatggctgacggggaagaatggtttgtacccaaacctgagcaagtcctatgcaaacaacaaagagaaagaagtccttatactatggggtgttcaccacccgcctaacataagggaccaaatgaccctctatcatacagaaaatgcttatgtctcggtagtgtcttcacattatagcagaagattcaccccagaaataaccaaaaggcccaaagtaagagatcaggaaggaagaatcaactactactggactctgctggaacccggggatacaataatatttgaggcaaatggaaatctaatagcgccatggtatgctttcgcactgagtagaggctttggatcaggaatcatcacctcaaatgcaccaatggatgaatgtgatgcgaagtgtcaaacacctaagggagctataaacagcagtcttcctttccagaatgtacatccagtcacaataggagagtgtccaaagtatgtcaggagtgcaaaattaaggatggttacaggactaaggaacatcccatccattcaatccagaggtttgtttggagccattgccggtttcattgaaggggggtggactggaatggtagatgggtggtatggttatcatcatcagaatgagcaaggatctggctatgctgcagatcaaaaaagcacacaaaatgccattaacgggattacaaacaaggtgaattctgtaattgagaaaatgaacactcaattcacagctgtgggcaaagaattcaacaaattggaaagaaggatggaaaatttaaataaaaaagtcgatgatgggtttctagacatttggacatataatgctgaattgttggttctactggaaaatgaaaggactttggatttccacgactccaatgtgaagaatctgtatgagaaagtaaaaagccaattaaagaataatgccaaagaaataggaaatgggtgttttgaattctatcacaagtgtaacaacgaatgcatggagagtgttaaaaatggaacttatgactatccaaaatattccgaagaatcaaagttaaacagggaaaaaattgatggagtgaaattggaatcaatgggggtctatcagattctggcgatctactcaactgtcgccagttccctggttcttttggtctccctgggggcaatcagcttctggatgtgttccaatgggtctttgcagtgtagaatatgcatctga

SEQ ID NO: 32643 - RNA, 1698 nt, synthetic construct
  misc_feature 1..1698: note = hemagglutinin__InfluenzaA__ABW81530
  source 1..1698: mol_type = other RNA
atgaaagtaaaactactgatcctgttatgtacatttacagctacatatgcagacacaatatgtataggctaccatgccaacaactcaaccgacactgttgacacagtacttgagaagaatgtgacagtgacacactctgtcaacctacttgaggacagtcacaatggaaaactgtgcctactaaaaggaatagcccccctacaattgggtaattgcagcgttgccggatggatcttaggaaacccagaatgcgaattactgatttccaaggaatcatggtcctacattgtagaaacaccaaatcctgagaatggagcatgttacccagggtatttcgccgactatgaggagctaagggagcaattgagttcagtatcttcatttgagagattcgaaatattccccaaagaaagctcatggcccaaccacaccgtaaccggagtatcagcatcatgctcccataatgggaaaagcagtttttacagaaatttgctatggctgacggggaagaatggtttgtacccaaacctgagcaagtcctatgcaaacaacaaagagaaagaagtccttatactatggggtgttcatcacccgcctaacataggggaccaaaggaccctctatcacacagaaaatgcttatgtctctgtagtgtcttcacattatagcagaagattcaccccagaaataaccaaaaggcccaaagtaagagatcaggaaggaagaatcaactactactggactctgctggaacccggggatacaataatatttgaggcaaatggaaatctaatagcgccatggtatgctttcgcactgagtagaggctttggatcaggaatcatcacctcaaatgcaccaatggatgaatgtgatgcgaagtgtcaaacacctcagggagctataaacagcagtcttcctttccagaatgtacacccagtcacaataggagagtgtccaaagtatgtcaggagtgcaaaattaaggatggttacaggactaaggaacatcccatccattcaatccagaggtttgtttggagccattgccggtttcattgaaggggggtggactggaatggtagatgggtggtatggttatcatcatcagaatgagcaaggatctggctatgctgcagatcaaaaaagcacacaaaatgccattaacaggattacaaacaaggtgaattctgtaattgagaaaatgaacactcaattcacagctgtgggcaaagaattcaacaaattggaaagaaggatggaaaacttaaataaaaaggttgatgatgggtttctagacatttggacatataatgcagaattgttggttctactggaaaatgaaaggactttggatttccacgactccaatgtgaagaatctgtacgagaaagtaaaaagccaattaaagaataatgccaaagaaataggaaatgggtgttttgaattctatcacaagtgtaacaatgaatgcatggagagtgtgaaaaatggaacttatgactatccaaaatattccgaagaatcaaagttaaacagggaaaaaattgatggagtgaaattggactcaatgggggtctatcagattctggcgatctactcaactgtcgccagttccctggttcttttggtctccctgggggcaatcagcttctggatgtgttccaatgggtctttgcagtgtagaatatgcatctga

SEQ ID NO: 32644 - RNA, 1698 nt, synthetic construct; identical to SEQ ID NO: 30830
  misc_feature 1..1698: note = hemagglutinin__InfluenzaA__ABW81531
  source 1..1698: mol_type = other RNA

SEQ ID NO: 32645 - RNA, 1698 nt, synthetic construct
  misc_feature 1..1698: note = hemagglutinin__InfluenzaA__ABW81532
  source 1..1698: mol_type = other RNA
atgaaagtaaaactactgatcctgttatgtacatttacagctacatatgcagacacaatatgtataggctaccatgccaacaactcaaccgacactgttgacacagtacttgagaagaatgtgacagtgacacactctgtcaacctacttgaggacagtcacaatggaaaactgtgcctactaaaaggaatagcccccctacaattgggtaattgcagcgttgccggatggatcttaggaaacccagaatgcgaattactgatttccaaggaatcatggtcctacattgtagaaacaccaaatcctgagaatggagcatgttacccatggtatttcgccgactatgaggagctaagggagcaattgagttcagtatcttcatttgagagattcgaaatattccccaaagaaagctcatggcccaaccacaccgtaaccggagtatcagcatcatgctcccataatgggaaaagcagtttttacagaaatttgctatggctgacggggaagaatggtttgtacccaaacctgagcaagtcctatgcaaacaacaaagagaaagaagtccttatactatggggtgttcatcacccgcctaacatagggaaccaaaggaccctctatcacacagaaaatgcttatgtctctgtagtgtcttcacattatagcagaagattcaccccagaaataaccaaaaggcccaaagtaagagatcaggaaggaagaatcaactactactggactctgctggaacccggggatacaataatatttgaggcaaatggaaatctaatagcgccatggtatgctttcgcactgagtagaggctttggatcaggaatcatcacctcaaatgcaccaatggatgaatgtgatgcgaagtgtcaaacacctcagggagctataaacagcagtcttcctttccagaatgtacacccagtcacaataggagagtgtccaaagtatgtcaggagtgcaaaattaaggatggttacaggactaaggaacatcccatccattcaatccagaggtttgtttggagccattgccggtttcattgaaggggggtggactggaatggtagatgggtggtatggttatcatcatcagaatgagcaaggatctggctatgctgcagatcaaaaaagcacacaaaatgccattaacgggattacaaacaaggtgaattctgtaattgagaaaatgaacactcaattcacagctgtgggcaaagaattcaacaaattggaaagaaggatggaaaacttaaataaaaaggttgatgatgggtttctagacatttggacatataatgcagaattgttggttctactggaaaatgaaaggactttggatttccacgactccaatgtgaagaatctgtacgagaaagtaaaaagccaattaaagaataatgccaaagaaataggaaatgggtgttttgaattctatcacaagtgtaacaatgaatgcatggagagtgtgaaaaatggaacttatgactatccaaaatattccgaagaatcaaagttaaacagggaaaaaattgatggagtgaaattggactcaatgggggtctatcagattctggcgatctactcaactgtcgccagttccctggttcttttggtctccctgggggcaatcagcttctggatgtgttccaatgggtctttgcagtgtagaatatgcatctga

SEQ ID NO: 32646 - RNA, 1698 nt, synthetic construct; identical to SEQ ID NO: 32463
  misc_feature 1..1698: note = hemagglutinin__InfluenzaA__ABW86321
  source 1..1698: mol_type = other RNA

SEQ ID NO: 32647 - RNA, 1698 nt, synthetic construct
  misc_feature 1..1698: note = hemagglutinin__InfluenzaA__ABW86332
  source 1..1698: mol_type = other RNA
atgaaagtaaaactacttgttctgttatgtacatttacagctacatatgcagacacaatatgtataggctaccatgccaacaactcgactgacactgttgacacagtacttgagaagaatgtgacagtgacacactctgtcaacctacttgaggacagtcacaatggaaaactatgtctactaaaaggaatagccccactacaattgggtaattgcagcgttgccggatggatcttaggaaacccagaatgcgaattactgatttccaaggaatcatggtcctacattgtagaaacaccaaatcctgagaatggaacatgttacccagggtatttcgccgactatgaggagctgagggagcaattgagttcagtatcttcatttgagaggttcgaaatattccccaaagagagctcatggcccaaccacaccgtaaccggagtatcagcatcatgctcccataacggggaaagcagtttttacagaaatttgttatggctgacggggaagaatggtttgtatccaaacctgagcaagtcctatgcaaacaacaaagagaaagaagtccttgtactgtggggtgttcatcacccgcctaacataggagaccaaagggccctctatcatacagaaaatgcttatgtctctgtagtgtcttcacattatagcagaagattcaccccagaaatagccaaaagacccaaggtgagagatcaggaaggaagaatcaactactactggactctgctggaacccggggatacaataatatttgaggcaaatggaaatctaatagcgccaaggtttgctttcgcactgagtagaggctttggatcaggaatcatcacctcaaatgcaccaatggataaatgtgatgcaaaatgtcaaacacctcagggagctataaacagcagtcttcctttccagaatgtacacccagtcacaataggagagtgtccaaagtatgtcaggagtacaaaattaagaatggttacaggactaaggaacatcccatccattcaatccagaggtttgtttggagccattgccggtttcattgaaggggggtggactggaatggtagatggttggtatggttatcaccatcagaatgagcaaggatctgggtatgctgcagatcaaaaaagcacacaaaatgccattaacgggattacaaacaaggtgaattctgtaattgagaaaatgaacactcaattcacagctgtgggcaaagaattcaacaaattggaaagaaggatggaaaatttaaataaaaaggttgatgatgggtttctagacatttggacatataacgcagaattgttggttctactggaaaatgaaaggactttggacttccatgactccaacgtgaagaatctgtatgagaaagtaaaaagccaattaaagaataatgccaaagaaataggaaacgggtgttttgaattctatcacaagtgtaacgatgaatgcatggagagtgtgaaaaatggaacttatgactatccaaaatattccgaagaatcaaagttgaacagggagaaaattgatggagtgaaattggaatcaatgggagtctatcagattctggcgatctactcaacagtcgccagttccttggttcttttggtctccctgggggcaatcagcttctggatgtgttccaatgggtctttgcagtgtagaatatgcatctaa

SEQ ID NO: 32648 - RNA, 1698 nt, synthetic construct; identical to SEQ ID NO: 32430
  misc_feature 1..1698: note = hemagglutinin__InfluenzaA__ABW86343
  source 1..1698: mol_type = other RNA

SEQ ID NO: 32649 - RNA, 1698 nt, synthetic construct; identical to SEQ ID NO: 32418
  misc_feature 1..1698: note = hemagglutinin__InfluenzaA__ABW86354
  source 1..1698: mol_type = other RNA

SEQ ID NO: 32650 - RNA, 1698 nt, synthetic construct; identical to SEQ ID NO: 32494
  misc_feature 1..1698: note = hemagglutinin__InfluenzaA__ABW86365
  source 1..1698: mol_type = other RNA

SEQ ID NO: 32651 - RNA, 1698 nt, synthetic construct
  misc_feature 1..1698: note = hemagglutinin__InfluenzaA__ABW86376
  source 1..1698: mol_type = other RNA
atgaaagtaaaactacttgttctgttatgtacatttacagctacatatgcagacacaatatgtataggctaccatgccaacaactcgaccgacactgttgacacagtacttgagaagaatgtgacagtgacacactctgtcaacctacttgaggacagtcacaatggaaaactatgtctactaaaaggaatagccccactacaattgggtaattgcagcgttgccggatggatcttaggaaacccagaatgcgaattactgatttccaaggaatcatggtcctacattgtagaaacaccaaatcctgagaatggaacatgttacccaggatatttcgccgactatgaggagctgagggagcaattgagttcagtatcttcatttgagaggttcgaaatattccccaaagagagctcatggcccaaccacaccgtaaccggagtatcagcatcatgctcccataacgggaaaagcagtttttacagaaatttgctatggctgacggggaagaatggtttgtatccaaacctgagcaagtcctatgcaaacaacaaagagaaagaagtccttgtactgtggggtgttcatcacccgcctaacataggggaccaaagggccctctatcatacagaaaatgcttatgtctctgtagtgtcttcacattatagcagaagattcaccccagaaatagccaaaagacccaaggtgagagatcaggaaggaagaatcaactactactggactctgctggaacccggggatacaataatatttgaggcaaatggaaatctaatagcgccaaggtttgctttcgcactgagtagaggctttggatcaggaatcatcacctcaaatgcaccaatgggtgaatgtgatgcgaagtgtcaaacacctcagggagctataaacagtagtcttcctttccagaatgtacatccagtcacaataggagagtgtccaaagtatgtcaggagtgcaaaattaagaatggttacaggactaaggaacatcccatcaattcaatccagaggtttgtttggagccattgccggtttcattgaaggggggtggactggaatggtagatggttggtatggttatcaccatcagaatgagcaaggatctgggtatgctgcagatcaaaaaagcacacaaaatgccattaacgggattacaaacaaggtgaattctgtaattgagaaaatgaacactcaattcacagctgtgggcaaagaattcaacaaattggaaagaaggatggaaaacttaaataaaaaggttgatgatgggtttctagacatttggacatataacgcagaattgttggttctactggaaaatgaaaggactttggacttccatgactccaacgtgaagaatctgtatgagaaagtaaaaagccaattaaagaataatgccaaagaaataggaaacgggtgttttgaattctatcacaagtgtaacgatgaatgcatggagagtgtgaaaaatggaacttatgactatccaaaatattccgaagaatcaaagttgaacagggagaaaattgatggagtgaaattggaatcaatgggagtctatcagattctggcgatctactcaacagtcgccagttccctggttcttttggtctccctgggggcaatcagcttctggatgtgttccaatgggtctttgcagtgtagaatatgcatctaa

SEQ ID NO: 32652 - RNA, 1698 nt, synthetic construct; identical to SEQ ID NO: 32494
  misc_feature 1..1698: note = hemagglutinin__InfluenzaA__ABW86387
  source 1..1698: mol_type = other RNA

SEQ ID NO: 32653 - RNA, 1698 nt, synthetic construct; identical to SEQ ID NO: 32430
  misc_feature 1..1698: note = hemagglutinin__InfluenzaA__ABW86409
  source 1..1698: mol_type = other RNA

SEQ ID NO: 32654 - RNA, 1698 nt, synthetic construct; identical to SEQ ID NO: 32489
  misc_feature 1..1698: note = hemagglutinin__InfluenzaA__ABW86431
  source 1..1698: mol_type = other RNA

SEQ ID NO: 32655 - RNA, 1698 nt, synthetic construct; identical to SEQ ID NO: 32418
  misc_feature 1..1698: note = hemagglutinin__InfluenzaA__ABW86442
  source 1..1698: mol_type = other RNA

SEQ ID NO: 32656 - RNA, 1698 nt, synthetic construct
  misc_feature 1..1698: note = hemagglutinin__InfluenzaA__ABW86453
  source 1..1698: mol_type = other RNA
atgaaagtaaaactacttgttctgttatgtacatttacagctacatatgcagacacaatatgtataggctaccatgccaacaactcgaccgacactgttgacacagtgcttgagaagaatgtgacagtgacacactctgtcaacctacttgaggacagtcacaatggaaaactatgtctactaaaaggaatagccccactacaattgggtaattgcagcgttgccggatggatcttaggaaacccagaatgcgaattactgatttccaaggaatcatggtcctacattgtagaaacaccaaatcctgagaatggaacatgttacccaggatatttcgccgactatgaggagctgagggagcaattgagttcagtatcttcatttgagaggttcgaaatattccccaaagagagctcatggcccaaccacaccgtaaccggagtatcagcatcatgctcccataacgggaaaagcagtttttacagaaatttgctatggctgacggggaagaatggtttgtatccaaacctgagcaagtcctatgcaaacaacaaagagaaagaagtccttgtactgtggggtgttcatcacccgcctaacataggggaccaaagggccctctatcatacagaaaatgcttatgtctctgtagtgtcttcacattatagcagaagattcaccccagaaatagccaaaagacccaaggtgagagatcaggaaggaagaatcaactactactggactctgctggaacccggggatacaataatatttgaggcaaatggaaatctaatagcgccaaggtttgctttcgcactgagtagaggctttggatcaggaatcatcacctcaaatgcaccaatgggtgaatgtgatgcgaagtgtcaaacacctcagggagctataaacagtagtcttcctttccagaatgtacacccagtcacaataggagagtgtccaaagtatgtcaggagtgcaaaattaagaatggttacaggactaaggaacatcccatccattcaatccagaggtttgtttggagccattgccggtttcattgaaggggggtggactggaatggtagatggttggtatggttatcaccatcagaatgagcaaggatctgggtatgctgcagatcaaaaaagcacacaaaatgccattaacgggattacaaacaaggtgaattctgtaattgagaaaatgaacactcaattcacagctgtgggcaaagaattcaacaaattggaaagaaggatggaaaacttaaataaaaaggttgatgatgggtttctagacatttggacatataacgcagaattgttggttctactggaaaatgaaaggactttggacttccatgactccaacgtgaagaatctgtatgagaaagtaaaaagccaattaaagaataatgccaaagaaataggaaacgggtgttttgaattctatcacaagtgtaacgatgaatgcatggagagtgtgaaaaatggaacttatgactatccaaaatattccgaagaatcaaagttgaacagggagaaaattgatggagtgaaattggaatcaatgggagtctatcagatcctggcgatctactcaacagtcgccagttccctggttcttttggtctccctgggggcaatcagcttctggatgtgttccaatgggtctttgcagtgtagaatatgcatctaa

SEQ ID NO: 32657 - RNA, 1698 nt, synthetic construct
  misc_feature 1..1698: note = hemagglutinin__InfluenzaA__ABW86464
  source 1..1698: mol_type = other RNA
atgaaagtaaaactactggttctgttatgtacatttacagctacatatgcagacacaatatgtataggctaccatgccaacaactcgaccgacactgttgacacagtacttgagaagaatgtgacagtgacacactctgtcaacctacttgaggacagtcacaatggaaaactatgtctactaaaaggaatagccccactacaattgggtaattgcagcgttgccggatggatcttaggaaacccagaatgcgaattactgatttccaaggaatcatggtcctacattgtagagacaccaaatcctgagaatggaacatgttacccagggtatttcgccgactatgaggagctgagagagcaattgagttcagtatcttcatttgagaggttcgaaatattccccaaagagagctcatggcccaaccacaccgtaaccggagtatcagcatcatgctcccataacgggaaaagcagtttttacagaaatttgctatggctgacggggaagaatggtttgtatccaaacctgagcaagtcctatgcaaacaacaaagagaaagaagtccttgtactgtggggtgttcatcacccgcctaacataggggaccaaagggccctctatcatacagaaaatgcttatgtctctgtagtgtcttcacattatagcagaagattcaccccagaaatagccaaaagacccaaggtgagagatcaggaaggaagaatcaactactactggactctgcttgaacccggggatacaataatatttgaggcaaatggaaatctaatagcgccaaggtttgctttcgcactgagtagaggctttggatcaggaatcatcacctcaaatgcaccaatggatgaatgtgatgcgaaatgtcaaacacctcagggagctataaacagcagtcttcctttccagaatgtacacccagtcacaataggagagtgtccaaagtatgtcaggagtacaaaattaagaatggttacaggactaaggaacatcccatcaattcaatccagaggcttgtttggagccattgccggtttcattgaaggggggtggactggaatggtagatggttggtatggttatcaccatcagaatgagcaaggatctgggtatgctgcagatcaaaaaagcacacaaaatgccattaacgggattacaaacaaggtgaattctgtaattgagaaaatgaacactcaattcacagctgtgggcaaagaattcaacaaattggaaagaaggatggaaaacttaaataaaaaagttgatgatgggtttctagacatttggacatataacgcagaattgttggttctactggaaaatgaaaggactttggacttccatgactccaacgtgaagaatctgtatgagaaagtaaaaagccaattaaagaataatgccaaagaaataggaaacgggtgttttgaattctatcacaagtgtaacgatgaatgcatggagagtgtgaaaaatggaacttatgactatccaaaatattccgaagaatcaaagttgaacagggagaaaattgatggagtgaaattggaatcaatgggagtctatcagattttggcgatctactcaacagtcgccagttccctggttcttttggtctccctgggggcaatcagcttctggatgtgttccaatgggtctttgcagtgtagaatatgcatctaa

SEQ ID NO: 32658 - RNA, 1698 nt, synthetic construct; identical to SEQ ID NO: 32571
  misc_feature 1..1698: note = hemagglutinin__InfluenzaA__ABW86475
  source 1..1698: mol_type = other RNA

SEQ ID NO: 32659 - RNA, 1698 nt, synthetic construct
  misc_feature 1..1698: note = hemagglutinin__InfluenzaA__ABW86486
  source 1..1698: mol_type = other RNA
atgaaagtaaaactactgattctgttatgtacatttaccgctacatatgcagacacaatatgtataggctaccatgccaacaactcgaccgacactgttgacacagtacttgagaagaatgtgacagtgacacactctgtcaacctacttgaggacagtcacaatggaaaactatgtctactaaagggaatagccccactacaattgggtaattgcagcgttgccggatggatcttaggaaacccagaatgcgaattgctgatttccaaggaatcatggtcctacattgtagagacaccaaatcctgagaatggaacatgttacccagggtatttcgccgactatgaggagctgagagagcaattgagttcagtatcttcatttgagaggttcgaaatattccccaaagagagctcatggcccaaccacaccgtaaccggagtatcagcatcatgctcccataacgggaaaagcagtttttacagaaatttgctatggctgacggggaagaatggtttgtatccaaacctgagcaagtcctatgcaaacaacaaagagaaagaagtccttgtactgtggggtgttcatcacccgcctaacataggggaccaaagggccctctatcatacagaaaatgcttatgtctctgtagtgtcttcacattatagcagaagattcaccccagaaatagccaaaagacccaaggtgagagatcaggaaggaagaatcaactactactggactctgcttgaacccggggatacaataatatttgaggcaaatggaaatctaatagcgccaaggtttgctttcgcactgagtagaggctttggatcaggaatcatcacctcaaatgcaccaatggatgaatgtgatgcgaaatgtcaaacacctcagggagctataaacagcagtcttcctttccagaatgtacacccagtcacaataggagagtgtccaaagtatgtcaggagtacaaaattaagaatggttacaggactaaggaacatcccatccattcaatcaagaggtttatttggagccattgctggtttcattgaaggggggtggactggaatggtagatggttggtatggttatcaccatcagaatgagcaaggatctgggtatgctgcagatcaaaaaagcacacaaaatgccattaacgggattacaaacaaggtgaattctgtaattgagaaaatgaacactcaattcacagctgtgggcaaagaattcaacaaattggaaagaaggatggaaaacttaaataaaaaagttgatgatgggtttctagacatttggacatataacgcagaattgttggttctactggaaaatgaaaggactttggacttccatgactccaacgtgaagaatctgtatgagaaagtaaaaagccaattaaagaataatgccaaagaaataggaaacgggtgttttgaattctatcacaagtgtaacgatgaatgcatggagagtgtgaaaaatggaacttatgactatccaaaatattccgaagaatcaaagttgaacagggagaaaattgatggagtgaaattggaatcaatgggagtctatcagattttggcgatctactcaacagtcgccagttccctggttcttttggtctccctgggggcaatcagcttctggatgtgttccaatgggtctttgcagtgtagaatatgcatctaa

SEQ ID NO: 32660 - RNA, 1698 nt, synthetic construct
  misc_feature 1..1698: note = hemagglutinin__InfluenzaA__ABW86497
  source 1..1698: mol_type = other RNA
atgaaagtgaaactactggttctgttatgtacatttacagctacatatgcggacacaatatgtataggctaccatgccaacaactcgaccgacactgttgacacagtacttgagaagaatgtgacagtgacacactctgtcaacctacttgaggaccgtcacaatggaaaactatgtctactaaaaggaatagccccactacaattgggtaattgcagcgttgccggatggatcttaggaaacccagaatgcgaattactgatttccaaggaatcatggtcctacattgtagaaacaccaaatcctgagaacggaacatgttacccagggtatttcgccgactatgaggagctgagggagcaattgagttcagtatcttcatttgagaggttcgaaatattccccaaagagagctcatggcccaaccacaccgtaaccggagtatcagcatcatgctcccataacgggaaaagcagtttttacagaaatttgctatggctgacgggaaagaatggtttgtacccaaacctgagcagatcctatgcaaacaacaaagagaaagaagtccttgtactgtggggtgttcatcacccgcctaacataggggaccaaagggccctctatcatacagaaaatgcttatgtctctgtagtgtcttcacattatagcagaagattcaccccagaaatagccaaaagacccaaggtgagagatcaggaaggaagaatcaattactactggactctactggaacccggggatacaataatatttgaggcaaatgggaatctaatagcgccaaggtttgctttcgcactgagtagaggctttggatcaggaatcatcacctcaaatgcaccaatggatgaatgtgatgcgaagtgtcaaacacctcagggagctataaacagcagtcttcctttccagaatgtacacccagtcacaataggagagtgtccaaagtatgtcaggagtgcaaaattaagaatggttacaggactaaggaacattccatccattcaatccagaggtttgtttggagccattgccggtttcattgaaggggggtggactggaatggtagatggttggtatggttatcaccaccagaatgagcaaggatctgggtatgctgcagatcaaaaaagcacacaaaatgccattaacgggattacaaacaaggtgaattctgtgattgagaaaatgaacactcaattcacagctgtgggcaaagaattcaacaaattggaaagaagaatggaaaacttaaataaaaaagttgatgatgggtttctagacatttggacgtataacgcagaattgttggttctactggaaaatgaaaggactttggacttccatgactccaacgtgaagaatctgtatgagaaagtaaaaagccaattaaagaataatgccaaagaaataggaaacgggtgttttgaattctatcacaagtgtaacgatgaatgcatggagagtgtgaaaaatggaacttatgactatccaaaatattccgaagaatcaaagttaaacagggagaaaattgatggagtgaaattggaatcaatgggagtctatcagattctggcgatctactcaacagtcgccagttccctggttcttttggtctccctgggggcaatcagcttctggatgtgttccaatgggtctttgcagtgtagaatatgcatctaa

SEQ ID NO: 32661 - RNA, 1698 nt, synthetic construct; identical to SEQ ID NO: 32429
  misc_feature 1..1698: note = hemagglutinin__InfluenzaA__ABW86508
  source 1..1698: mol_type = other RNA

SEQ ID NO: 32662 - RNA, 1698 nt, synthetic construct
  misc_feature 1..1698: note = hemagglutinin__InfluenzaA__ABW86519
  source 1..1698: mol_type = other RNA
atgaaagtaaaactacttgttctgttatgtacatttacagctacatatgcagacacaatatgtataggctaccatgccaacaactcgaccgacactgttgacacagtacttgagaagaatgtgacagtgacacactctgtcaacctacttgaggacagtcacaatggaaaactatgtctactaaaaggaatagccccactacaattgggtaattgcagcgttgccggatggatcttaggaaacccagaatgcgaattactgatttccaaggaatcatggtcctacattgtagaaacaccaaatcctgagaatggaacatgttacccaggatatttcgccgactatgaggagctgagggagcaattgagttcagtatcttcatttgagaggttcgaaatattccccaaagagagctcatggcccaaccacaccgtaaccggagtatcagcatcatgctcccataacgggaaaagcagtttttacagaaatttgctatggctgacggggaagaatggtttgtatccaaacctgagcaagtcctatgcaaacaacaaggagaaagaagtccttgtactgtggggtgttcatcacccgcctaacataggggaccaaagggccctctatcatacagaaaatgcttatgtctctgtagtgtcttcacattatagcagaagattcaccccagaaatagccaaaagacccaaggtgagaaatcaggaaggaagaatcaactactactggactctgctggaacccggggatacaataatatttgaggcaaatggaaatctaatagcgccaaggtttgctttcgcactgagtagaggctttggatcaggaatcatcacctcaaatgcaccaatgggtgaatgtgatgcgaagtgtcaaacacctcagggagctataaacagtagtcttcctttccagaatgtacatccagtcacaataggggagtgtccaaagtatgtcaggagtgcaaaattaagaatggttacaggactaaggaacatcccatccattcaatccagaggtttgtttggagccattgccggtttcattgaaggggggtggactggaatggtagatggttggtatggttatcaccatcagaatgagcaaggatctgggtatgctgcagatcaaaaaagcacacaaaatgccattaacgggattacaaacaaggtgaattctgtaattgagaaaatgaacactcaattcacagctgtgggcaaagaattcaacaaattggaaagaaggatggaaaacttaaataaaaaggttgatgatgggtttctagacatttggacatataacgcagaattgttggttctactggaaaatgaaaggactttggacttccatgactccaacgtgaagaatctgtatgagaaagtaaaaagccaattaaagaataatgccaaagaaataggaaacgggtgttttgaattctatcacaagtgtaacgatgaatgcatggagagtgtgaaaaatggaacttatgactatccaaaatattccgaagaatcaaagttgaacagggagaaaattgatggagtgaaattggaatcaatgggagtctatcagattctggcgatctactcaacagtcgccagttccctggttcttttggtctccctgggggcaatcagcttctggatgtgttccaatgggtctttgcagtgtagaatatgcatctaa

SEQ ID NO: 32663 - RNA, 1698 nt, synthetic construct; identical to SEQ ID NO: 32424
  misc_feature 1..1698: note = hemagglutinin__InfluenzaA__ABW86530
  source 1..1698: mol_type = other RNA

SEQ ID NO: 32664 - RNA, 1698 nt, synthetic construct
  misc_feature 1..1698: note = hemagglutinin__InfluenzaA__ABW86541
  source 1..1698: mol_type = other RNA
atgaaagtaaaactacttgttctgttatgtacatttacagctacatatgcagacacaatatgtataggctaccatgccaacaactcgaccgacactgttgacacagtacttgagaagaatgtgacagtgacacactctgtcaacctacttgaggacagtcacaatggaaaactatgtctgctaaaaggaatagccccactacaattgggtaattgcagcgttgccggatggatcttaggaaacccagaatgcgaattactgatttccaaggaatcatggtcctacattgtagaaacaccaaatcctgagaatggaacatgttacccaggatatttcgccgactatgaggagctgagggagcaattgagttcagtatcttcatttgagaggttcgaaatattccccaaagagagctcatggctcaaccacaccgtaaccggagtatcagcatcatgctcccataacgggaaaagcagtttttacagaaatttgctatggctgacggggaagaatggtttgtatccaaacctgagcaagtcctatgcaaacaacaaagagaaagaagtccttgtactgtggggtgttcatcacccgcctaacataggggaccaaagggccctctatcatacagaaaatgcttatgtctctgtagtgtcttcacattatagcagaagattcaccccagaaatagccaaaagacccaaggtgagagatcaggaaggaagaatcaactactactggactctgctggaacccggggatacaataatatttgaggcaaatggaaatctaatagcgccaaggtttgctttcgcactgagtagaggctttggatcaggaatcatcacctcaaatgcaccaatgggtgaatgtgatgcgaagtgtcaaacacctcagggagctataaacagtagtcttcctttccagaatgtacacccagtcacaataggagagtgtccaaagtatgtcaggagtgcaaaattaagaatggttacaggactaaggaacatcccatccattcaatccagaggtttgtttggagccattgccggtttcattgaaggggggtggactggaatggtagatggttggtatggttatcaccatcagaatgagcaaggatctgggtatgctgcagatcaaaaaagcacacaaaatgccattaacgggattacaaacaaggtgaattctgtaattgagaaaatgaacactcaattcacagctgtgggcaaagaattcaacaaattggaaaggaggatggaaaacttaaataaaaaggttgatgatgggtttctagacatttggacatataacgcagaattgttggttctactggaaaatgaaaggactttggacttccatgactccaacgtgaagaatctgtatgagaaagtaaaaagccaattaaagaataatgccaaagaaataggaaacgggtgttttgaattctatcacaagtgtaacgatgaatgcatggagagtgtgaaaaatggaacttatgactatccaaaatattccgaagaatcaaagttgaacagggagaaaattgatggagtgaaattggaatcaatgggagtctatcagattctggcgatctactcaacagtcgccagttccctggttcttttggtctccctgggggcaatcagcttctggatgtgttccaatgggtctttgcagtgtagaatatgcatctaa

SEQ ID NO: 32665 - RNA, 1698 nt, synthetic construct
  misc_feature 1..1698: note = hemagglutinin__InfluenzaA__ABW86552
  source 1..1698: mol_type = other RNA
atgaaagtaaaactactgattctgttatgtacatttacagctacatatgcagacacaatatgtataggctaccatgccaacaactcgaccgacactgttgacacagtacttgagaagaatgtgacagtgacacactctgtcaacctacttgaggacagtcacaatggaaaactatgtctactaaaaggaatagccccactacaattgggtaattgcagcgttgccggatggatcttaggaaacccagaatgcgaattactgatttccaaggaatcatggtcctacattgtagagacaccaaatcctgagaatggaacatgttacccagggtatttcgccgactatgaggagctgagagagcaattgagttcagtatcttcatttgagaggttcgaaatattccccaaagagagctcatggcccaaccacaccgtaaccggagtatcagcatcatgctcccataacgggaaaagcagtttttacagaaatttgctatggctgacggggaagaatggtttgtatccaaacctgagcaagtcctatgcaaacaacaaagagaaagaagtccttgtactgtggggtgttcatcacccgcctaacataggggaccaaagggccctctatcatacagaaaatgcttatgtctctgtagtgtcttcacattatagcagaagattcaccccagaaatagccaaaagacccaaggtgagagatcaggaaggaagaatcaactactactggactctgcttgaacccggggatacaataatatttgaggcaaatggaaatctaatagcgccaaggtttgctttcgcactgagtagaggctttggatcaggaatcatcacctcaaatgcaccaatggatgaatgtgatgcgaaatgtcaaacacctcagggagctataaacagcagtcttcctttccagaatgtacacccagtcacaataggagagtgtccaaagtatgtcaggagtacaaaattaagaatggttacaggactaaggaacatcccatccattcaatccagaggtttatttggagccattgccggtttcattgaaggggggtggactggaatggtagatggttggtatggttatcaccatcagaatgagcaaggatctgggtatgctgcagatcaaaaaagcacacaaaatgccattaacgggattacaaacaaggtgaattctgtaattgagaaaatgaacactcaattcacagctgtgggcaaagaattcaacaaattggaaagaaggatggaaaacttaaataaaaaagttgatgatgggtttctagacatttggacatataacgcagaattgttggttctactggaaaatgaaaggactttggacttccatgactccaacgtgaagaatctgtatgaaaaagtaaaaagccaattaaagaataatgccaaagaaataggaaacgggtgttttgaattctatcacaagtgtaacgatgaatgcatggagagtgtgaaaaatggaacttatgactatccaaaatattccgaagaatcaaagttgaacagggagaaaattgatggagtgaaattggaatcaatgggagtctatcagattttggcgatctactcaacagtcgccagttccctggttcttttggtctccctgggggcaatcagcttctggatgtgttccaatgggtctttgcagtgtagaatatgcatctaa

SEQ ID NO: 32666 - RNA, 1701 nt, synthetic construct
  misc_feature 1..1701: note = hemagglutinin__InfluenzaA__ABW86563
  source 1..1701: mol_type = other RNA
atgaagactatcattgctttgagctacattctatgtctggttttcgctcaaaaacttcctggaaatgacaacagcacggcaacgctgtgccttgggcaccatgcagtaccaaacggaacgatagtgaaaacaatcacgaatgaccaaattgaagttactaatgctactgagctggttcagagttcctcaacaggtgaaatatgcgacagtcctcatcagatccttgatggagaaaactgcacactaatagatgctctattgggagaccctcagtgtgatggcttccaaaataagaaatgggacctttttgttgaacgcagcaaagcctacagcaactgttacccttatgatgtgccggattatgcctcccttaggtcactagttgcctcatccggcacactggagtttaacaatgaaagcttcaattggactggagtcactcaaaacggaacaagctctgcttgcataaggagatctaataacagtttctttagtagattgaattggttgacccacttaaaattcaaatacccagcattgaacgtgactatgccaaacaatgaaaaatttgacaaattgtacatttggggggttcaccacccgggtacggacaatgaccaaatcttcctgtatgctcaagcatcaggaagaatcacagtctctaccaaaagaagccaacaaactgtaatcccgaatatcggatctagacccagagtaaggaatatccccagcagaataagcatctattggacaatagtaaaaccgggagacatacttttgattaacagcacagggaatctaattgctcctaggggttacttcaaaatacgaagtgggaaaagctcaataatgagatcagatgcacccattggcaaatgcaattctgaatgcatcactccaaatggaagcattcccaatgacaaaccattccaaaatgtaaacaggatcacatacggggcctgtcccagatatgttaagcaaaacactctgaaattggcaacagggatgcgaaatgtaccagagaaacaaactagaggcatatttggcgcaatcgcgggtttcatagaaaatggttgggagggaatggtggatggttggtacggtttcaggcatcaaaattctgagggaataggacaagcagcagatctcaaaagcactcaagcagcaatcgatcaaatcaatgggaagctgaataggttgatcgggaaaaccaacgagaaattccatcagattgaaaaagaattctcagaagtcgaagggaggattcaggaccttgagaaatatgttgaggacaccaaaatagatctctggtcatacaacgcggagcttcttgttgccctggagaaccaacatacaattgatctaactgactcagaaatgaacaaactgtttgaaaaaacaaagaagcaactgagggaaaatgctgaggatatgggcaatggttgtttcaaaatataccacaaatgtgacaatgcctgcataggatcaatcagaaatggaacttatgaccacgatgtatacagagatgaagcattaaacaaccggttccagatcaagggcgttgagctgaagtcaggacacaaagattggatcctatggatttcctttgccatatcatgtttcttgctttgtgttgctttgttggggttcatcatgtgggcctgccaaaaaggcaacattaggtgcaacatttgcatctga

SEQ ID NO: 32667 - RNA, 1698 nt, synthetic construct; identical to SEQ ID NO: 32451
  misc_feature 1..1698: note = hemagglutinin__InfluenzaA__ABW86606
  source 1..1698: mol_type = other RNA

SEQ ID NO: 32668 - RNA, 1701 nt, synthetic construct
  misc_feature 1..1701: note = hemagglutinin__InfluenzaA__ABW91185
  source 1..1701: mol_type = other RNA
atgaaagcaaaactactggtcctgttatgtgcactttcagctacagatgcagacacaatatgtataggctaccatgcgaacaactcaaccgacactgttgacacagtactcgaaaagaacgtgacagtgacacactctgtcaacctacttgaggacaatcacaacggaaaactatgcaaactaaaaggaatagccccactacaattggggaaatgcagcattgccggatggatcttaggaaacccagaatgcgaatcactgttttctaagaaatcatggtcctacattgcagaaacaccaaactccgagaatggaacatgttacccagggtatttcgccgactatgaggaactgagggaacaattgagttcagtatcatcattcgagagattcgaaatattccccaaggaaagttcatggcccaaacacaacgtaaccaaaggagtaacggcatcatgctcccataaggggaaaagcagtttttacagaaatttgctatggctgacggagaaaaatggctcgtacccaaatctgagcaagtcctatgtgaacaacaaagagaaagaagtccttgtactatggggtgttcatcacccgtctaacatagaggaccaaaagaccatctatcgtaaagaaaatgcttatgtatctgtagtgtcttcacattataacaggagattcaccccagaaatagcaaaaagacccaaagtaagaaatcaagaagggagaattaattactactggactctgctggaacccggggacacaataatatttgaggcaaatggaaatctaatagcgccatggtatgctttcgcattgagtagaggctttgggtcaggaatcatcacctcaaacgcatcgatggatgaatgtgacgcgaagtgtcaaacaccccagggagctataaacagtagtcttccttttcagaatgtacacccagtcacaataggagagtgcccaaagtacgtcaggagtacaaaattaaggatggttacaggactaaggaacatcccatccattcaatccagaggtttgtttggagccattgccggtttcattgaagggggatggactggaatgattgatggatggtatggttatcatcatcagaatgaacagggatctggctatgctgcggatcaaaaaagcacacaaaatgccattaacgggattacaaacaaggtgaactctataatcgagaaaatgaatactcaattcacagctgtgggtaaagaattcaacaaactagaaaaaaggatggaaaacttaaataaaaaagttgatgatggatttctggacatttggacatataatgcagaattgttggttctactggaaaatgaaaggactttggatttccatgactcaaatgtgaagaacctgtatgagaaagtaaaaagccaattaaagaataatgccaaagaaataggaaacgggtgttttgaattctaccacaagtgtaacaatgaatgcatggaaagtgtaaaaaatgggacttatgactatccaaaatattcagaagaatcaaagttaaacagggaaaaaattgatggagtgaaattggaatcaatgggagtctatcagattctggcgatctactcaactgtcgccagttcactggtgcttttggtctccctgggggcaatcagcttctggatgtgttctaatgggtctttgcagtgcagaatatgcatctga

SEQ ID NO: 32669 - RNA, 1701 nt, synthetic construct
  misc_feature 1..1701: note = hemagglutinin__InfluenzaA__ABW91196
  source 1..1701: mol_type = other RNA
atgaagactatcattgctttgagctacattctatgtctggttttcgctcaaaaacttcctggaaatgacaacagcacggcaacgctgtgccttgggcaccatgcagtaccaaacggaacgatagtgaaaacaatcacgaatgaccaaattgaagttactaatgctactgagctggttcagagttcctcaacaggtgaaatatgcaacagtcctcatcagatccttgatggagaaaactgcacactaatagatgctctattgggagaccctcagtgtgatggcttccaaaataagaaatgggacctttttgttgaacgcagcaaagcctacagcaactgttacccttatgatgtgccggattatgcctcccttaggtcactagttgcctcatccggcacactggagtttaacaatgaaagcttcaattggactggagtcactcaaaacggaacaagctctgcttgcataaggagatctaataacagtttctttagtagattgaattggttgacccacttaaaattcaaatacccagcattgaacgtgactatgccaaacaatgaaaaatttgacaaattgtacatttggggggttcaccacccgggtacggacaatgaccaaatcttcctgtatgctcaagcatcaggaagaatcacagtctctaccaaaagaagccaacaaactgtaatcccgaatatcggatctagacccagagtaaggaatatccccagcagaataagcatctattggacaatagtaaaaccgggagacatacttttgattaacagcacagggaatctaattgctcctaggggttacttcaaaatacgaagtgggaaaagctcaataatgagatcagatgcacccattggcaaatgcaattctgaatgcatcactccaaatggaagcattcccaatgacaaaccattccaaaatgtaaacaggatcacatacggggcctgtcccagatatgttaagcaaaacactctgaaattggcaacagggatgcgaaatgtaccagagaaacaaactagaggcatatttggcgcaatcgcgggtttcatagaaaatggttgggagggaatggtggatggttggtacggtttcaggcatcaaaattctgagggaataggacaagcagcagatctcaaaagcactcaagcagcaatcgatcaaatcaatgggaagctgaataggttgatcgggaaaaccaacgagaaattccatcagattgaaaaagaattctcagaagtcgaagggagaattcaggaccttgagaaatatgttgaggacaccaaaatagatctctggtcatacaacgcggagcttcttgttgccctggagaaccaacatacaattgatctaactgattcagaaatgaacaaactgtttgaaaaaacaaagaagcaactgagggaaaatgctgaggatatgggcaatggttgtttcaaaatataccacaaatgtgacaatgcctgcataggatcaatcagaaatggaacttatgaccacgatgtatacagagatgaagcattaaacaaccggttccagatcaagggcgttgagctgaagtcaggatacaaagattggatcctatggatttcctttgccatatcatgttttttgctttgtgttgctttgttggggttcatcatgtgggcctgccaaaaaggcaacattaggtgcaacatttgcatttga

SEQ ID NO: 32670 - RNA, 1701 nt, synthetic construct; identical to SEQ ID NO: 32669
  misc_feature 1..1701: note = hemagglutinin__InfluenzaA__ABW91207
  source 1..1701: mol_type = other RNA

SEQ ID NO: 32671 - RNA, 1698 nt, synthetic construct
  misc_feature 1..1698: note = hemagglutinin__InfluenzaA__ABW91218
  source 1..1698: mol_type = other RNA
atgaaagtaaaactactgattctgttatgtacatttacagctacatatgcagacacaatatgtataggctaccatgccaacaactcgaccgacactgttgacacagtacttgagaagaatgtgacagtgacacactctgtcaacctacttgaggacagtcacaatggaaaactatgtctactaaaaggaatagccccactacaattgggtaattgcagcgttgccggatggatcttaggaaacccagaatgcgaattactgatttccaaggaatcatggtcctacattgtagagacaccaaatcctgagaatggaacatgttacccagggtatttcgccgactatgaggaactgagagagcaattgagttcagtatcttcatttgagaggttcgaaatattccccaaagagagctcatggcccaaccacaccgtaaccggagtatcagcatcatgctcccataacgggaaaagcagtttttacagaaatttgctatggctgacggggaagaatggtttgtatccaaacctgagcaagtcctatgcaaacaacaaagagaaagaagtccttgtactgtggggtgttcatcacccgcctaacataggggaccaaagggccctctatcatacagaaaatgcttatgtctctgtagtgtcttcacattatagcagaagattcaccccagaaatagccaaaagacccaaggtgagagatcaggaaggacgaatcaactactactggactctgcttgaacccggggatacaataatatttgaggcaaatggaaatctaatagcgccaaggtttgctttcgcactgagtagaggctttggatcaggaatcatcacctcaaatgcaccaatggatgaatgtgatgcgaaatgtcaaacacctcagggagctataaacagcagtcttcctttccagaacgtacacccagtcacaataggagagtgtccaaagtatgtcaggagtacaaaattaagaatggttacaggactaaggaacatcccatccattcaatccagaggtttatttggagccattgccggtttcattgaaggggggtggactggaatggtagatggttggtatggttatcaccatcagaatgagcaaggatctgggtatgctgcagatcaaaaaagcacacaaaatgccattaacgggattacaaacaaggtgaattctgtaattgagaaaatgaacactcaattcacagctgtgggcaaagaattcaacaaattggaaagaaggatggaaaacttaaataaaaaagttgatgatgggtttctagacatttggacatataacgcagaattgttggttctactggaaaatgaaaggactttggacttccatgactccaacgtgaagaatctgtatgagaaagtaaaaagccaattaaagaataatgccaaagaaataggaaacgggtgttttgaattctatcacaagtgtaacgatgaatgcatggagagtgtgaaaaatggaacttatgactatccaaaatattccgaagaatcaaagttgaacagggagaaaattgatggagtgaaattggaatcaatgggagtctatcagattttggcgatctactcaacagtcgccagttccctggttcttttggtctccctgggggcaatcagcttctggatgtgttccaatgggtctttgcagtgtagaatatgcatctaa

SEQ ID NO: 32672 - RNA, 1701 nt, synthetic construct
  misc_feature 1..1701: note = hemagglutinin__InfluenzaA__ABW91240
  source 1..1701: mol_type = other RNA
atgaagactatcattgctttgagctacattctatgtctggttttcgctcaaaaacttcctggaaatgacaacagcacggcaacgctgtgccttgggcaccatgcagtaccaaacggaacgatagtgaaaacaatcacgaatgaccaaattgaagttactaatgctactgagctggttcagagttcctcaacaggtgaaatatgcgacagtcctcatcagatccttgatggagaaaactgcacactaatagatgctctattgggagaccctcagtgtgatggcttccaaaataagaaatgggacctttttgttgaacgcagcaaagcctacagcaactgttacccttatgatgtgccggattatgcctcccttaggtcactagttgcctcatccggcacactggaatttaacaatgaaagcttcaattggactggagtcactcaaaacggaacaagctctgcttgcataaggagatctaataacagtttctttagtagattgaattggttgacccacttaaaattcaaatacccagcattgaacgtgactatgccaaacaatgaaaaatttgacaaattgtacatttggggggttcaccacccgggtacggacaatgaccaaatcttcctgtatgctcaagcatcaggaagaatcacagtctctaccaaaagaagccaacaaactgtaatcccgaatatcggatctagacccagagtaaggaatatccccagcagaataagcatctattggacaatagtaaaaccgggagacatacttttgattaacagcacagggaatctaattgctcctaggggttacttcaaaatacgaagtgggaaaagctcaataatgagatcagatgcacccattggcaaatgcaattctgaatgcatcactccaaatggaagcattcccaatgacaaaccattccaaaatgtaaacaggatcacatacggggcctgtcccagatatgttaagcaaaacactctgaaattggcaacagggatgcgaaatgtaccagagaaacaaactagaggcatatttggcgcaatcgcgggtttcatagaaaatggttgggagggaatggtggatggttggtacggtttcaggcatcaaaattctgagggaataggacaagcagcagatctcaaaagcactcaagcagcaatcgatcaaatcaatgggaagctgaataggttgatcgggaaaaccaacgagaaattccatcagattgaaaaagaattctcagaagtcgaagggaggattcaggaccttgagaaatatgttgaggacaccaaaatagatctctggtcatacaacgcggagcttcttgttgccctggagaaccaacatacaattgatctaactgactcagaaatgaacaaactgtttgaaaaaacaaagaagcaactgagggaaaatgctgaggatatgggcaatggttgtttcaaaatataccacaaatgtgacaatgcctgcataggatcaatcagaaatggaacttatgaccacgatgtatacagagatgaagcattaaacaaccggttccagatcaagggcgttgagctgaagtcaggatacaaagattggatcctatggatttcctttgccatatcatgttttttgctttgtgttgctttgttggggttcatcatgtgggcctgccaaaaaggcaacattaggtgcaacatttgcatttga

SEQ ID NO: 32673 - RNA, 840 nt, synthetic construct
  misc_feature 1..840: note = hemagglutinin__InfluenzaA__ABW91251
  source 1..840: mol_type = other RNA
atgaagactatcattgctttgagctacattctatgtctggttttcgctcaaaaacttcccggaaatgacaacagcacggcaacgctgtgccttgggcaccatgcagtaccaaacggaacgatagtgaaaacaatcacgaatgaccaaattgaagttactaatgctactgagctggttcagagttcctcaacaggtgaaatatgcgacagtcctcatcagatccttgatggagaaaactgcacactaatagatgctctattgggagaccctcagtgtgatggcttccaaaataagaaatgggacctttttgttgaacgcagcaaagcctacagcaactgttacccttatgatgtgccggattatgcctcccttaggtcactagttgcctcatccggcacactggagtttaacaatgaaagcttcaattggactggagtcactcaaaacggaacaagctctgcttgcataaggagatctaataacagtttctttagtagattgaattggttgacccacttaaaattcaaatacccagcattgaacgtgactatgccaaacaatgaaaaatttgacaaattgtacatttggggggttcaccacccgggtacggacaatgaccaaatcttcctgtatgctcaagcatcaggaagaatcacagtctctaccaaaagaagccaacaaactgtaatcccgaatatcggatctagacccagagtaaggaatatccccagcagaataagcatttattggacaatagtaaaatcgggagacatacttttgattaacagcacagggaatctaattgctcctaggggttacttcaaaatacgaagtgggaaa
